(19) United States
(12) Patent Application Publication
(10) Pub. No.: US 2023/0245716 A1
(43) Pub. Date: Aug. 3, 2023

(54) Systems and Methods for Stable and Heritable Alteration by Precision Editing (SHAPE)

(71) Applicant: The General Hospital Corporation, Boston, MA (US)

(72) Inventors: J. Keith Joung, Winchester, MA (US); Luca Pinello, Jamaica Plain, MA (US); Jonathan Hsu, Cambridge, MA (US); Julian Grunewald, Charlestown, MA (US); Y. Esther Tak, Charlestown, MA (US); Md Nafiz Hamid, Quincy, MA (US)

(21) Appl. No.: 17/928,105

(22) PCT Filed: May 28, 2021
(86) PCT No.: PCT/US2021/034996

§ 371 Date: Nov. 28, 2022

Related U.S. Application Data
(60) Provisional application No. 63/032,486, filed on May 29, 2020.

(51) Int. Cl. G16B 20/30; G16B 30/10; C12N 9/22; C12N 15/90

(52) U.S. Cl. CPC G16B 20/30; G16B 30/10; C12N 9/22; C12N 15/907; C12N 2310/20

(57) ABSTRACT

Described herein are systems, methods, and compositions for the precise editing of DNA sequence(s) at specific loci to alter expression of target gene products at the pre-transcriptional or post-transcriptional level in a durable fashion, termed Stable and Heritable Alteration by Precision Editing (SHAPE). The SHAPE platform utilizes genetic modifiers (e.g., nucleases, (CRISPR guided) transposases, recombinases, base editors, and prime editors) to install specific sequence motifs at target sequences through precision genome engineering.

### CLAIM OF PRIORITY

[0001] This application is a U.S. National Phase Application under 35 U.S.C. § 371 of International Patent Application No. PCT/US2021/034996, filed on May 28, 2021, which claims the benefit of U.S. Provisional patent application Ser. No. 63/032,486, filed on May 29, 2020. The entire contents of the foregoing are hereby incorporated by reference.

### FEDERALLY SPONSORED RESEARCH OR DEVELOPMENT

[0002] This invention was made with Government support under Grant Nos. GM118158, CA211707, CA204954, and HG010717 awarded by the National Institutes of Health. The Government has certain rights in the invention.

### SEQUENCE LISTING

[0003] This application contains a Sequence Listing that has been submitted electronically as an ASCII text file named ‘29539 0527US1 Sequence Listing’. The ASCII text file, created on Nov. 21, 2022, is 891 kilobytes in size. The material in the ASCII text file is hereby incorporated by reference in its entirety.

### TECHNICAL FIELD

[0004] Described herein are systems, methods, and compositions for the precise editing of DNA sequence(s) at specific loci to alter expression of target gene products at the pre-transcriptional or post-transcriptional level in a durable fashion, termed Stable and Heritable Alteration by Precision Editing (SHAPE). The SHAPE platform utilizes genetic modifiers (e.g., nucleases, (CRISPR guided) transposases, recombinases, base editors, and prime editors) to install specific sequence motifs at target sequences through precision genome engineering.

### BACKGROUND

[0005] Precisely controlling gene expression in biosystems has important applications in biotechnology and therapeutic settings^{5 6 6, 7}. Pre-transcriptional strategies for gene regulation include the use of artificial transcription factors (ATFs) where a programmable DNA-binding domain (e.g., zinc fingers, transcription activator-like effectors, CRISPR-Cas) is coupled with an effector domain (e.g., VP64, p65, KRAB) to alter gene transcription⁶, whereas post-transcriptional strategies include targeted protein degradation (TPD) and RNA interference (RNAi). These gene regulation strategies are transient in nature and require re-dosing or constitutive expression of the exogenous biomolecules to have durable and sustained effect(s). There remains a need for durable gene regulation strategies that don't require constitutive presence of exogenous biomolecules.

### SUMMARY

[0006] Described herein are genome engineering strategies for the precise installation of sequence motifs at specific loci to alter expression of target gene products at the pre-transcriptional or post-transcriptional level, termed Stable and Heritable Alteration by Precision Editing (SHAPE). The SHAPE platform includes the identification of 1) functional sequence motifs with regulatory potential, 2) target regions for sequence modification to take place, and 3) genetic modifiers to use to achieve the precise edit of interest to ultimately induce targeted gene expression change(s) for a cell type or cell types of interest (Table 1 and 2).

[0007] Thus, provided herein are methods for identifying a method for altering expression of target genes in selected cell types.

[0008] Thus, provided herein are methods for identifying a genetic modifier to alter expression of a target gene in a selected cell type. The methods include: providing, optionally from a database, one or more candidate regulatory motif sequences with regulatory potential (as described herein, e.g., binding sites for transcription factors or other factors that affect gene expression and are expressed in the cell, e.g., endogenous factors) in the selected cell type; selecting a sequence of a putative regulatory region of the target gene, preferably wherein the putative regulatory region is in a promoter, enhancer, insulator, untranslated region (UTR), or intron, optionally in a non-coding region of the target gene; comparing the sequence of the putative regulatory region to the candidate regulatory motif sequences, identifying a candidate regulatory motif sequence that has either little to no identity at all (e.g., for the insertion strategy) as a potential insertion site or that has at least 50% identity and at least one mismatch (i.e., not 100% identity, for the substitution strategy) to a (corresponding) portion of the sequence of the regulatory sequence as a potential substitution site;

[0009] determining sequence alterations needed to make the putative regulatory region match (e.g., to include or have 100% identity with) the candidate regulatory motif sequence; and

[0010] identifying one or more genetic modifiers capable of making the sequence alterations needed to make the putative regulatory region match the candidate regulatory motif sequence. In some embodiments, identifying a genetic modifier comprises using a computer or an algorithm that compares the putative regulatory region and candidate regulatory motif sequences from a database and identifies candidate regulatory motif sequences that differ from the putative regulatory region by at least one nucleotide and up to 100% as a potential insertion site, or that differ from the putative regulatory region by at least one nucleotide and up to a selected amount, optionally at least 50% identity, as a potential substitution site, determines sequence alterations needed to make the putative regulatory region match the candidate regulatory motif sequence, compares the sequence alterations to a database of modifications that could be made by a set of genetic modifiers, and identifying one or more genetic modifiers that can alter the putative regulatory region to match the candidate regulatory motif sequence, to thereby introduce a functional regulatory motif.

[0011] In some embodiments, the candidate regulatory sequence motif has regulatory potential to affect target gene expression at the pre-transcriptional or post-transcriptional level.

[0012] In some embodiments, the candidate regulatory sequence motif is a transcription factor binding sequence that can recruit endogenous transcription factors within a cell type or cell types of interest (e.g., cell type-specific factors), where the sequence motif may or may not exist in the genome of the selected cell type.

[0013] In some embodiments, the candidate regulatory sequence motif alters spacing of endogenous transcription factor binding sites in the putative regulatory region.

[0014] In some embodiments, the candidate regulatory sequence motif is a response element that is activated by a receptor-ligand complex through binding of an exogenously delivered small molecule, hormone, or drug for inducible target gene activation.

[0015] In some embodiments, the candidate regulatory sequence motif either stabilizes or de-stabilizes target gene transcripts, where the candidate regulatory sequence motif may or may not exist in the genome of the selected cell type.

[0016] In some embodiments, the candidate regulatory sequence motif is a hybridization target for endogenous non-coding RNAs (e.g., miRNAs, siRNAs, lncRNAs), where the sequence motif may or may not exist in the genome of interest.

[0017] In some embodiments, the candidate regulatory sequence motif modifies the translation initiation and/or elongation efficiency for target gene transcripts (e.g., Kozak sequence, optimal codon structure), and wherein the candidate regulatory sequence motif may or may not exist in the genome of the selected cell type.

[0018] In some embodiments, the putative regulatory region has the potential to modify expression of the target gene at the pre-transcriptional or post-transcriptional level.

[0019] In some embodiments, the putative regulatory region is a non-coding DNA sequence within 1 Mb or more of a target gene of interest, or spatially-proximal as determined by chromosome conformation capture assays.

[0020] In some embodiments, the putative regulatory region is a promoter of a target gene of interest, e.g., a proximal regions e.g., 1000 bp upstream and 500 bp downstream of the transcription start site (TSS).

[0021] In some embodiments, the putative regulatory region comprises putative enhancer elements of a target gene of interest as defined by histone marks associated and/or chromatin accessibility features associated with functional enhancer elements (e.g., H3K4me1, H3K27ac); putative insulator elements of the target gene of interest as defined by histone marks associated and/or chromatin accessibility features associated with functional insulator elements; and/or putative silencer elements of the target genes of interest as defined by histone marks associated and/or chromatin accessibility features associated with functional silencer elements.

[0022] In some embodiments, the putative regulatory region comprises untranslated regions (UTRs) of the target gene transcripts.

[0023] In some embodiments, the putative regulatory regions comprise an intronic region of the target gene transcripts.

[0024] In some embodiments, the putative regulatory regions comprises a coding sequence of target gene transcripts.

[0025] In some embodiments, the identified genetic modifier can introduce a specific sequence motif or modification at the target genomic region.

[0026] In some embodiments, the genetic modifier comprises a CRISPR-Cas domain, a zinc-finger DNA binding domain, or a transcription activator-like (TAL) effector domain.

[0027] In some embodiments, the CRISPR-Cas domain is used with a gRNA, wherein the gRNA comprises a sequence complementary to a sequence of the target cis-regulatory element of interest.

[0028] In some embodiments, the genetic modifier is a programmable nuclease (e.g., zinc finger nucleases, transcription activator-like effector nucleases, Cas9, CasX, Cas12), a base editor (e.g., ABE, CBE), or a prime editor (e.g., SpCas9H840A-MMLV-RT).

[0029] In some embodiments, the CRISPR-Cas prime editor further comprises a prime editing gRNA (pegRNA) and nicking sgRNA (ngRNA) wherein the pegRNA and ngRNA comprise a sequence complementary to a sequence of the target cis-regulatory element of interest.

[0030] Also provided herein are methods for altering expression of a target gene in a selected cell type. The methods include providing, optionally from a database, one or more candidate regulatory motif sequences with regulatory potential in the selected cell type; selecting a sequence of a putative regulatory region of the target gene, preferably wherein the putative regulatory region is in a promoter, enhancer, insulator, untranslated region (UTR), or intron, optionally in a non-coding region of the target gene; comparing the sequence of the putative regulatory region to the candidate regulatory motif sequences, identifying a candidate regulatory motif sequence that has either no identity at all as a potential insertion site or that has at least 50% identity and at least one mismatch to a portion of the sequence of the regulatory sequence as a potential substitution site; determining sequence alterations needed to make the putative regulatory region match the candidate regulatory motif sequence; and identifying one or more genetic modifiers capable of making the sequence alterations needed to make the putative regulatory region match the candidate regulatory motif sequence, and contacting the cell with the one or more genetic modifiers under conditions and for a time sufficient for the one or more genetic modifiers to make the putative regulatory region match the candidate regulatory motif sequence.

[0031] In some embodiments, identifying a genetic modifier comprises using a computer or an algorithm that compares the putative regulatory region and candidate regulatory motif sequences from a database and identifies candidate regulatory motif sequences that differ from the putative regulatory region by at least one nucleotide and up to 100% as a potential insertion site, or that differ from the putative regulatory region by at least one nucleotide and up to a selected amount, optionally at least 50% identity, as a potential substitution site, determines sequence alterations needed to make the putative regulatory region match the candidate regulatory motif sequence, compares the sequence alterations to a database of modifications that could be made by a set of genetic modifiers, and identifying one or more genetic modifiers that can alter the putative regulatory region to match the candidate regulatory motif sequence, to thereby introduce a functional regulatory motif.

[0032] Also provided herein are methods for altering expression of a target gene in a selected cell, the method comprising contacting the selected cell with a genetic modifier identified using a method described herein, under conditions sufficient to increase the target gene expression in the cell.

[0033] Additionally, provided herein are methods for heterotopic activation of a target gene expression in a selected cell, the method comprising contacting the cell with a genetic modifier identified using a method described herein, under conditions sufficient to increase the target gene expression in the cell.

[0034] In some embodiments, the candidate regulatory sequence motif is introduced into the putative regulatory region as a single motif or a repetitive sequence with multiple copies of the single motif, optionally with linker sequences therebetween.

[0035] In some embodiments, the genetic modifier introduces multiplex edits (e.g., installation of multiple transcription factor binding sites) in order to induce more robust modification of a single target gene expression. For example, a single type of modifier such as a prime editor or CRISPR Cas domain containing protein can be used, wherein that modifier is guided to multiple locations in the genome via multiple guide RNAs to enable multiplex edits.

[0036] In some embodiments, the genetic modifier introduces multiplex edits (e.g., installation of multiple transcription factor binding sites) in order to perform multi-gene expression control.

[0037] In some embodiments, the cell is a eukaryotic cell, e.g., a mammalian cell, e.g., a human cell.

[0038] Also provided herein are methods for treating or reducing risk of a condition or a disease in a subject, wherein the condition or the disease is caused, at least in part, by insufficient expression of the target gene, the method comprising administering to the subject an effective amount of a genetic modifier identified using a method described herein, under conditions sufficient to increase the target gene expression in the cell, thereby treating or reducing risk of the condition or the disease in the subject.

[0039] In some embodiments, the condition or the disease is caused, at least in part, by insufficient expression of the target gene on an allele.

[0040] In some embodiments, the condition or the disease is related to haploinsufficiency.

[0041] In some embodiments, the condition or the disease is caused, at least in part, by a dominant-negative gene.

[0042] In some embodiments, the condition or the disease is caused, at least in part, by insufficient expression of a target gene that is under the control of an enhancer, wherein the enhancer controls the expression of a plurality of genes.

[0043] In some embodiments, the method causes an increase in the expression of the target gene in the cell or in the cell of the subject by at least 1.1 fold as measured by mRNA expression.

[0044] Also provided herein are method for treating or reducing risk of a condition or a disease in a subject, wherein the condition or the disease is caused, at least in part, by overexpression of the target gene, the method comprising administering to the subject an effective amount of a genetic modifier identified using a method as described herein, under conditions sufficient to increase the target gene expression in the cell, thereby treating or reducing risk of the condition or the disease in the subject.

[0045] In some embodiments, the method causes a decrease in the expression of the target gene in the cell or in the cell of the subject by at least 1.1 fold.

[0046] In some embodiments, the subject is a mammal, e.g., a human.

[0047] In some embodiments, the present methods include:
[0048] Identifying one or more regulatory motif sequences with regulatory potential in the selected cell type or tissue;
[0049] Identifying a sequence of a putative regulatory region of the target gene;
[0050] Comparing the sequence of the regulatory region to the regulatory motif sequences, and identifying a candidate motif sequence that has:
[0051] (A) For a substitution-based strategy: at least 5% identity and at least one mismatch (i.e., not 100% identity) to a portion of the sequence of the regulatory sequence;
   [0052] identifying a genetic modifier (e.g. base or prime editors) capable of altering the regulatory region to match (have 50-100% identity with) the candidate motif sequence, sufficient to create a binding site.
[0053] (B) For an insertion-based strategy: no homology between the endogenous target sequence and the intended created motif is needed. The nucleotides/bases that include the regulatory sequence or motif will be inserted into a regulatory region of any gene of interest. Following the identification of the regulatory motif and target sequence for genome engineering, a genetic modifier (e.g. prime editors, nuclease for homology directed repair (HDR) strategy, targeted transposases or recombinases) is identified that is capable of altering the regulatory region to match (have 100% identity with) the candidate motif sequence.
[0054] (C) For an indel-based strategy: DSBs via genetic modifiers (e.g. SpCas9) and the resulting insertion and deletion (indel) mutations are often predictable (e.g. +1 insertions, MMEJ patterns) to a certain degree and can be utilized to introduce new binding sites (50-100% identity with candidate motifs) for the recruitment of transcription factors (activators or repressors). Furthermore, indel mutations can also introduce different spacing between endogenous transcription factor binding sites, leading to an alternative way to modulate target gene expression.

[0055] The methods can include using an algorithm that compares the target regulatory regions and regulatory motif sequences identified above and identifies candidate regulatory motif sequences that differ from the target gene regulatory region by up to 100% for the insertion strategy and less than a selected amount, e.g., by 95% for the insertion strategy, and compares the candidate regulatory motifs to the possible modifications that would be made by a set of genetic modifiers (e.g., to predict the modification(s) made by each of a set of genetic modifiers, to identify one or more genetic modifiers that can be used to modify the target regulatory region to introduce a functional regulatory motif.

[0056] The methods can include CRISPR-guided multiplex gene editing with guide RNAs targeting a nuclease or base/prime editor at two, three, or more, e.g., up to 25, endogenous target sites to introduce multiple regulatory sequences in a given cell type or tissue to modify gene regulation at one or multiple genes in parallel (Campa et al, Nature Methods 2019, Vol 16, pp 887-893). In the referenced paper Cas12a is used for gene editing. This enzyme has been shown to work efficiently in the context of 2^{nd} generation CRISPR tools as well, such as e.g. base editors (Richter et al, Nat Biotechnol (2020). doi.org/10.1038/s41587-020-0453-z).

[0057] Also provided herein are methods for identifying a genetic modifier to alter expression of a target gene in a selected cell type, the methods comprising:

Identifying one or more regulatory motif sequences with regulatory potential in the selected cell type;
Identifying a sequence of a putative regulatory region of the target gene, preferably wherein the regulatory region is in a promoter, enhancer, insulator, UTR, or intron, optionally in a non-coding region of the target gene;
Comparing the sequence of the regulatory region to the regulatory motif sequences, and identifying a candidate motif sequence that has either no homology at all in case of the insertion strategy or that has at least 50% identity and at least one mismatch (i.e., not 100% identity) to a portion of the sequence of the regulatory sequence in case of the substitution strategy; and Identifying a genetic modifier capable of altering the regulatory region to match (have 100% identity with) the candidate motif sequence, preferably wherein the genetic modifier is a zinc finger nuclease, CRISPR-Cas9 nuclease, base editor, or prime editor
optionally comprising using an algorithm that compares the target regulatory regions and regulatory motif sequences and identifies candidate regulatory motif sequences that differ from the target gene regulatory region by up to 1-100% for the insertion strategy and less than a selected amount, e.g., by 95% for the substitution strategy and compares the candidate regulatory motifs to the possible modifications that would be made by a set of genetic modifiers, to identify one or more genetic modifiers that can be used to modify the target regulatory region to introduce a functional regulatory motif.

[0058] In some embodiments, the identified or discovered sequence motif or modification has regulatory potential to affect target gene expression at the pre-transcriptional or post-transcriptional level.

[0059] In some embodiments, the identified or discovered sequence motif is a transcription factor binding sequence that can recruit endogenous transcription factors within a cell type or cell types of interest (cell type-specific), where the sequence motif that may or may not exist in the genome of interest.

[0060] In some embodiments, the identified or discovered sequence modification alters the spacing of endogenous transcription factor binding sites in the genome.

[0061] In some embodiments, the sequence motif is a response element that is activated by a receptor-ligand complex through binding of an exogenously delivered small molecule, hormone, or drug for inducible target gene activation.

[0062] In some embodiments, the identified or discovered sequence motif or modification either stabilizes or de-stabilizes target gene transcripts, where the sequence motif that may or may not exist in the genome of interest.

[0063] In some embodiments, the identified or discovered sequence motif is a hybridization target for endogenous non-coding RNAs (e.g., miRNAs, siRNAs, lncRNAs), where the sequence motif that may or may not exist in the genome of interest.

[0064] In some embodiments, the identified or discovered sequence motif modifies the translation initiation and/or elongation efficiency for target gene transcripts (e.g., Kozak sequence, optimal codon structure), where the sequence motif that may or may not exist in the genome of interest.

[0065] In some embodiments, the identified or discovered sequence motif or modification is determined by a combination of gene expression (e.g., RNA-seq), chromatin accessibility (e.g., ATAC-seq, DNase-seq), DNA-protein interaction (e.g., ChIP-seq), and/or primary DNA sequence data from a single cell type or set of cell types of interest.

[0066] In some embodiments, the identification or discovery of sequence motifs can be performed by integrative analysis of genomics data across different cell types, e.g., using a computational strategy wherein regions of interest are uncovered based on their cell type specific activity for a particular class of functional regions and on genomic data e.g., chromatin marks (e.g., H3k27ac, H3k27me3), chromatin accessibility (e.g., DNase-seq or ATAC-seq) or DNA methylation; based on the recovered regions and a list of known TF motifs, regions are searched for enriched patterns and their significance evaluated; integrating gene expression data a short list of candidate TF are provided to account for their endogenous expression across the different cell types and their expected potency based on genes that are downstream of the regions uncovered in the second step; and a ranked list of TF sequences is generated based on this integrative approach for each cell type.

[0067] In some embodiments, the discovery of the sequence motifs is done by de novo motif discovery analysis within a single cell type or set of cell types of interest.

[0068] In some embodiments, the discovery of sequence motifs is done by analyzing cis-regulatory DNA sequence composition of top-expressing genes (e.g., top 1%, 5%, 20%, 50%) ranked by normalized expression values (e.g., RPKM, FPKM, TPM, fold-change) in a single cell type or set of cell types of interest.

[0069] In some embodiments, the discovery of the sequence motifs is done by analyzing cis-regulatory DNA sequence composition of bottom-expressing genes (e.g., bottom 1%, 5%, 20%, 50%) ranked by normalized expression values (e.g., RPKM, FPKM, TPM, fold-change) in a single cell type or set of cell types of interest.

[0070] In some embodiments, the discovery of the sequence motifs is done through frequency-based methods including the construction of position-weight matrices for a single cell type or set of cell types of interest.

[0071] In some embodiments, the discovery of the sequence motifs is done through neural network architectures to identify sequence motifs that may or may not exist in a single cell type or set of cell types of interest.

[0072] In some embodiments, the discovery of the sequence motifs is done through generation of synthetic DNA sequences using language models—a generative deep learning technique—where the sequence motifs may or may not exist in a single cell type or set of cell types of interest.

[0073] In some embodiments, the discovery of the sequence motifs is done through generation of synthetic DNA sequences using deep variational autoencoders—a generative deep learning model—where the sequence motifs may or may not exist in a single cell type or set of cell types of interest.

[0074] In some embodiments, the discovery of the sequence motifs is done through generation of synthetic DNA sequences using Generative Adversarial Networks (GANs)—a generative deep learning model—where the sequence motifs may or may not exist in a single cell type or set of cell types of interest.

[0075] In some embodiments, the discovery of the sequence motifs is done through the identification of transcription factor binding sequence motifs with dependencies with other sequence motifs (e.g., pairwise, triwise interactions).

[0076] In some embodiments, the discovery of the sequence motifs is done through the identification of transcription factor binding sequence motifs that recruit additional transcriptional machinery through protein-protein interactions.

[0077] In some embodiments, the identified sequence motif is from an online database for transcription factor binding motifs (e.g., JASPAR, HOCOMOCO).

[0078] In some embodiments, the sequence motif is introduced as a single motif or a repetitive sequence with multiple copies of the single motif that may or may not have linker sequences interspaced.

[0079] In some embodiments, the sequence motif is introduced as a combination of different sequence motifs with predicted additive or synergistic effects on target gene expression at the pre-transcriptional and/or post-transcriptional level, where the multiple sequence motifs may or may not have linker sequences interspaced.

[0080] In some embodiments, the target genomic region to introduce the sequence motif or modification is able to or has the potential to modify target gene expression at the pre-transcriptional or post-transcriptional level.

[0081] In some embodiments, the target genomic regions are non-coding DNA sequences within 1 Mb or more of the target gene(s) of interest, or spatially-proximal as determined by chromosome conformation capture assays.

[0082] In some embodiments, the target genomic regions are promoters of the target gene(s) of interest, defined as proximal regions e.g., 1000 bp upstream and 500 bp downstream of the transcription start site (TSS).

[0083] In some embodiments, the target genomic regions are putative enhancer elements of the target gene(s) of interest defined by histone marks associated and/or chromatin accessibility features associated with functional enhancer elements (e.g., H3K4me1, H3K27ac).

[0084] In some embodiments, the target genomic regions are putative insulator elements of the target gene(s) of interest defined by histone marks associated and/or chromatin accessibility features associated with functional insulator elements.

[0085] In some embodiments, the target genomic regions are putative silencer elements of the target gene(s) of interest defined by histone marks associated and/or chromatin accessibility features associated with functional silencer elements.

[0086] In some embodiments, the target genomic regions are untranslated regions (UTRs) of target gene transcripts.

[0087] In some embodiments, the target genomic regions are intronic regions of target gene transcripts.

[0088] In some embodiments, the target genomic regions are coding sequences of target gene transcripts.

[0089] In some embodiments, the genetic modifier to use is able to introduce the specific sequence motif or modification at the target genomic region with sufficient efficiency and precision.

[0090] In some embodiments, the genetic modifier comprises a CRISPR-Cas domain, a zinc-finger DNA binding domain, or a transcription activator-like (TAL) effector domain.

[0091] In some embodiments, the genetic modifier is a programmable nuclease (e.g., zinc finger nucleases, transcription activator-like effector nucleases, Cas9, CasX, Cas12).

[0092] In some embodiments, the CRISPR-Cas domain further comprises a gRNA wherein the gRNA comprises a sequence complementary to a sequence of the target cis-regulatory element of interest.

[0093] In some embodiments, the genetic modifier is a base editor (e.g., ABE, CBE).

[0094] In some embodiments, the genetic modifier is a prime editor (e.g., SpCas9H840A-MMLV-RT).

[0095] In some embodiments, the CRISPR-Cas prime editor further comprises a prime editing gRNA (pegRNA) and nicking sgRNA (ngRNA) wherein the pegRNA and ngRNA comprise a sequence complementary to a sequence of the target cis-regulatory element of interest.

[0096] In some embodiments, the genetic modifier introduces multiplex edits (e.g., installation of multiple transcription factor binding sites) in order to induce more robust modification of a single target gene expression.

[0097] In some embodiments, the genetic modifier introduces multiplex edits (e.g., installation of multiple transcription factor binding sites) in order to perform multi-gene expression control.

[0098] In some embodiments, the use of unbiased saturation mutagenesis screening to empirically determine genetic editing modalities (e.g., programmable nucleases, base editors, prime editors) and target sites (e.g., promoter, enhancers, UTRs) to modify target gene(s) expression.

[0099] The present methods can be used for increasing a target gene expression in a cell, and for heterotopic activation of a target gene expression in a cell, by contacting the cell with a genetic modifier identified using a method described herein.

[0100] In some embodiments, the cell is a eukaryotic cell.

[0101] In some embodiments, the cell is a mammalian cell.

[0102] In some embodiments, the cell is a human cell.

[0103] Also provided are methods for treating or preventing a condition or a disease in a subject, the method comprising administering to the subject an effective amount of a genetic modifier identified by a method described herein, e.g., in a pharmaceutical composition, thereby treating or preventing the condition or the disease.

[0104] In some embodiments, the condition or the disease is caused, at least in part, by insufficient expression of the target gene.

[0105] In some embodiments, the condition or the disease is caused, at least in part, by insufficient expression of the target gene on an allele.

[0106] In some embodiments, the condition or the disease is related to haploinsufficiency.

[0107] In some embodiments, the condition or the disease is caused, at least in part, by a dominant-negative gene.

[0108] In some embodiments, the administration of the pharmaceutical composition increases expression of the target gene, thereby treating the condition or the disease.

[0109] In some embodiments, the condition or the disease is caused, at least in part, by insufficient expression of a target gene that is under the control of an enhancer, wherein the enhancer controls the expression of a plurality of genes.

[0110] In some embodiments, the method causes increase in the expression of the target gene in the cell or in the cell of the subject by at least 1.1 fold, 2 fold, at least 3 fold, at least 4 fold, at least 5 fold, at least 6 fold, at least 7 fold, at least 8 fold, at least 9 fold, at least 10 fold, at least 15 fold, at least 20 fold, at least 25 fold, at least 30 fold, at least 35 fold, at least 40 fold, at least 45 fold, at least 50 fold, at least 60 fold, at least 70 fold, at least 80 fold, at least 90 fold, at least 100 fold, at least 150 fold, at least 200 fold, at least 300 fold, at least 350 fold, at least 400 fold, at least 450 fold, at least 500 fold, at least 600 fold, at least 700 fold, at least 800 fold, at least 900 fold, at least 1000 fold, at least 1100 fold, at least 1200 fold, at least 1300 fold, at least 1400 fold, at least 1500 fold, at least 1600 fold, at least 1700 fold, at least 1800 fold, at least 1900 fold, at least 2000 fold, at least 2500 fold, or at least 3000 fold, as measured by mRNA expression.

[0111] In some embodiments, the method causes a decrease in the expression of the target gene in the cell or in the cell of the subject by at least 1.1 fold, 2 fold, at least 3 fold, at least 4 fold, at least 5 fold, at least 6 fold, at least 7 fold, at least 8 fold, at least 9 fold, at least 10 fold, at least 15 fold, at least 20 fold, at least 25 fold, at least 30 fold, at least 35 fold, at least 40 fold, at least 45 fold, at least 50 fold, at least 60 fold, at least 70 fold, at least 80 fold, at least 90 fold, at least 100 fold, at least 150 fold, at least 200 fold, at least 300 fold, at least 350 fold, at least 400 fold, at least 450 fold, at least 500 fold, at least 600 fold, at least 700 fold, at least 800 fold, at least 900 fold, at least 1000 fold, at least 1100 fold, at least 1200 fold, at least 1300 fold, at least 1400 fold, at least 1500 fold, at least 1600 fold, at least 1700 fold, at least 1800 fold, at least 1900 fold, at least 2000 fold, at least 2500 fold, or at least 3000 fold, as measured by mRNA expression.

[0112] In some embodiments, the methods include providing a cell of the selected cell type and contacting the cell with the genetic modifier to alter the regulatory region to match the candidate motif sequence.

[0113] In some embodiments, the methods alter expression of gene products at the pre-transcriptional (e.g., recruitment of endogenous transcription factors, transcription activation or repression) or post-transcriptional level (e.g., sequence motifs that modify transcript stability, sequence motifs that modify translation initiation and/or elongation efficiency), in the context of a single cell type or set of cell types of interest.

[0114] In some embodiments, identifying one or more candidate motif sequences with regulatory potential in the selected cell type comprises referring to a database comprising a plurality of regulatory sequence motifs, e.g., endogenous regulatory sequences that are present in the selected cell type (e.g., in the species of the cell) but not in the target gene, or exogenous regulatory sequences (e.g., not present in the cell, from a different species, or artificial regulatory sequences) that bind to a factor present in the cell (e.g., a transcription factor, target sequence for endogenous non-coding RNAs, a sequence motif in the untranslated regions (UTR) of a transcript that increases or decreases the stability and/or affects the transcription of the RNA molecules, and/or sequence motif that modifies the translation initiation or elongation efficiency of transcripts, in the selected cell type.

[0115] In some embodiments, the candidate sequence motif is a transcription factor binding sequence, e.g., a binding sequence that is endogenous (present in the genome, but not in the gene, of the cell of interest), or exogenous (e.g., not present in the cell of interest, e.g., an artificial TF binding site or a TF binding site from another cell type or species that binds an endogenous TF that is expressed in the cell) of interest (Table 3A).

[0116] In some embodiments, the candidate sequence motif is a range for spacing between endogenous transcription factor binding sites that modifies gene expression.

[0117] In some embodiments, the candidate sequence motif is a known sequence motif in the untranslated regions (UTR) of transcripts that increases or decreases the stability and/or affects the transcription of these RNA molecules in cells, either endogenous or exogenous.

[0118] In some embodiments, the candidate sequence motif is a known target sequence for endogenous non-coding RNAs (e.g., miRNAs, siRNAs, lncRNAs) that affect the target transcript stability.

[0119] In some embodiments, the candidate sequence motif is a sequence motif that is exogenous (not present in the genome of interest), but that recruits endogenous non-coding RNAs (e.g., miRNAs, siRNAs, lncRNAs) that affect the target transcript stability (Table G, H, I, and J).

[0120] In some embodiments, the candidate sequence motif is an (endogenous or exogenous) sequence motif that modifies the translation initiation (e.g., Kozak sequence) or elongation (e.g., codon optimization) efficiency of transcripts.

[0121] In some embodiments, the candidate sequence motif encodes a 2A self-cleaving peptide (e.g., T2A, P2A, E2A, F2A).

[0122] In some embodiments, the candidate sequence motif encodes an intein sequence.

[0123] In one aspect, the present application includes identifying target genomic regions to modify that, upon the introduction of specific sequence motifs within this genomic region, may alter expression of a target gene or set of target genes at the pre-transcriptional or post-transcriptional level, in the context of a cell type or set of cell types of interest.

[0124] In some embodiments, the target genomic regions are non-coding DNA sequences within 1 Mb or more of the target gene(s) of interest.

[0125] In some embodiments, the target genomic regions are promoters of the target gene(s) of interest, defined as proximal regions e.g., 1000 bp upstream and 500 bp downstream of the transcription start site (TSS).

[0126] In some embodiments, the target genomic regions are putative enhancer elements of the target gene(s) of interest defined by histone marks and/or chromatin accessibility features associated with functional enhancer elements (e.g., H3K4me1, H3K27ac)¹⁷.

[0127] In some embodiments, the target genomic regions are putative insulator elements of the target gene(s) of interest defined by histone marks and/or chromatin accessibility features associated with functional insulator elements^{17,18}.

[0128] In some embodiments, the target genomic regions are putative silencer elements of the target gene(s) of interest defined by histone marks and/or chromatin accessibility features associated with functional silencer elements¹⁹.

[0129] In some embodiments, the target genomic regions are untranslated regions (UTRs) of target gene transcripts.

[0130] In some embodiments, the target genomic regions are intronic regions of target gene transcripts.

[0131] In some embodiments, the target genomic regions are coding sequences of target gene transcripts.

[0132] In some embodiments, the endogenous regulatory region of a gene (e.g., the promoter) is targeted to modify or enhance downstream transcription of translation machinery. This can be achieved e.g., by installing or modifying a TATA box (also known as Goldberg-Hogness box) in archae or eukaryotes or a Pribnow box in prokaryotes or by installing enhanced Kozak ((gcc)gccRccAUGG (SEQ ID NO: 478)) in eukaryotes, Shine-Dalgarno (AGGAGGU) in prokaryotes, start codon (AUG and CUG in mammalian cells, AUA and AUU in mitochondria, GUG and UUG in E. coli) or stop codon (UGA, UAG, UAA) sequences²⁰.

[0133] In some embodiments binding sites of non-coding RNAs (ncRNAs), such as microRNAs (miRNAs) or long non-coding RNAs (lncRNAs) are installed or modified to alter the binding of said ncRNAs to DNA or RNA with the result of altered gene expression, and/or RNA abundance, and/or protein expression.

[0134] The methods can include producing a list of candidate sequence modifications that can be made to add a candidate motif to the target sequence.

[0135] The present methods also include identifying genetic modifiers that can introduce specific candidate sequence motifs into target genomic regions with high predicted precision and efficiency that may alter expression of a target gene or set of genes at the pre-transcriptional or post-transcriptional level, in the context of a cell type or set of cell types of interest. Genetic modifiers can include a programmable nuclease (e.g., zinc finger nucleases, transcription activator-like effector nucleases, and CRISPR-Cas systems, e.g., Cas9, CasX, Cas12); base editors (e.g. ABEs, CBEs, and CGBEs); and prime editors, inter alia (Table 2).

[0136] In some embodiments, algorithms can be used to identify a genetic modifier, e.g., based on comparing the desired sequence modifications to be made to the changes that could be made by a number of genetic modifiers.

[0137] In some embodiments, the sequence motif is to be introduced as a single motif or a repetitive sequence with multiple copies of the single motif that may or may not have linker sequences interspaced.

[0138] In some embodiments, the sequence motif is to be introduced as a combination of different sequence motifs with predicted additive or synergistic effects on target gene expression at the pre-transcriptional and/or post-transcriptional level, where the multiple sequence motifs may or may not have linker sequences interspaced.

[0139] In some embodiments, the methods can include predicting a sequence modification that would be caused by one genetic modifiers, e.g., using an algorithm, e.g., a computer-based method.

[0140] Unless otherwise defined, all technical and scientific terms used herein have the same meaning as commonly understood by one of ordinary skill in the art to which this invention belongs. Methods and materials are described herein for use in the present invention; other, suitable methods and materials known in the art can also be used. The materials, methods, and examples are illustrative only and not intended to be limiting. All publications, patent applications, patents, sequences, database entries, and other references mentioned herein are incorporated by reference in their entirety. In case of conflict, the present specification, including definitions, will control.

[0141] Other features and advantages of the invention will be apparent from the following detailed description and figures, and from the claims

### DESCRIPTION OF DRAWINGS

[0142] FIG. 1. Illustration of the MYOD1 locus and experimental designs for prime editing. Illustration of the human MYOD1 gene, open chromatin features at MYOD1 locus from ATAC-seq from HEK293T cell line, and pegRNAs and nicking sgRNAs locations. Three pegRNAs (Table B) were designed upstream of MYOD1, and two nicking sgRNAs (Table C) were designed downstream of each pegRNA.

[0143] FIG. 2. Quantification of the desired transcription factor motif insertion event by prime editing across multiple motif sequences. Only perfect insertion events by prime editing were included in this analysis. A total of 3 pegRNAs (A, B, and C) and 10 transcription factor motifs (Table D) were tested. The length of insertions were either single copies of the transcription factor binding motif (1×) or two copies of the single motifs without an intervening linker sequence (2×). Each pegRNA was paired with 3 different nicking sgRNAs (1 upstream, 2 downstream) and the editing efficiencies are grouped into each bar.

[0144] FIG. 3. MYOD1 gene expression changes with ELF motif insertion. RNA expression levels of the endogenous MYOD1 gene in HEK293T in the presence of PE3, pegRNA that has ELF motif, and nicking sgRNA. For motif #, 1× and 2× indicate that pegRNA has single or double ELF motifs, respectively. Three pegRNAs (A, B, C) and two nicking sgRNAs for each pegRNA were tested. MYOD1 transcript levels were measured by RT-qPCR, normalized to HPRT1 levels, and values shown are normalized relative to a control sample (labelled Empty) in which pegRNA cassette was expressed.

[0145] FIG. 4. MYOD1 gene expression changes with NFY motif insertion. RNA expression levels of the endogenous MYOD1 gene in HEK293T in the presence of PE3, pegRNA that has NFY motif, and nicking sgRNA. For motif #, 1× and 2× indicate that pegRNA has single or double NFY motifs, respectively. Three pegRNAs (A, B, C) and two nicking sgRNAs for each pegRNA were tested. MYOD1 transcript levels were measured by RT-qPCR, normalized to HPRT1 levels, and values shown are normalized relative to a control sample (labelled Empty) in which pegRNA cassette was expressed.

[0146] FIG. 5. MYOD1 gene expression changes with GATA motif insertion. RNA expression levels of the endogenous MYOD1 gene in HEK293T in the presence of PE3, pegRNA that has GATA1 motif, nicking sgRNA, and exogenous expression of GATA1. For motif #, 1×, 2×, and 3× indicate that pegRNA has single or double or triple GATA1 motifs, respectively. Three pegRNAs (A, B, C) and two nicking sgRNAs for each pegRNA were tested. MYOD1 transcript levels were measured by RT-qPCR, normalized to HPRT1 levels, and values shown are normalized relative to a control sample (labelled Empty) in which pegRNA cassette was expressed.

[0147] FIG. 6. MYOD1 gene expression changes with SP motif insertion. RNA expression levels of the endogenous MYOD1 gene in HEK293T in the presence of PE3, pegRNA that has SP1 motif, and nicking sgRNA. For motif #, 1× indicates that pegRNA has a single SP1 motif. Three pegRNAs (A, B, C) and two nicking sgRNAs for each pegRNA were tested. MYOD1 transcript levels were measured by RT-qPCR, normalized to HPRT1 levels, and values shown are normalized relative to a control sample (labelled Empty) in which pegRNA cassette was expressed.

[0148] FIG. 7. MYOD1 gene expression changes with EWS-FLI1 motif insertion. RNA expression levels of the endogenous MYOD1 gene in HEK293T in the presence of PE3, pegRNA that has EWS-FLI1 motif, nicking sgRNA, and exogenous EWS-FLI1. For motif #, 3× and 6× indicate that pegRNA has triple or sextuple of GGAA motifs. Three pegRNAs (A, B, C) and two nicking sgRNAs for each pegRNA were tested. MYOD1 transcript levels were measured by RT-qPCR, normalized to HPRT1 levels, and values shown are normalized relative to a control sample (labelled Empty) in which pegRNA cassette was expressed.

[0149] FIGS. 8A-B. Genome-wide analysis of possible CCA>TTG base edits in the human genome in gene promoters that could create transcription factor binding sites. A) Bar plots showing computationally determined number of genes (y-axis) that could be targeted by SPACE to install 1-10 (or more) transcription factor (TF) binding sites (x-axis) in proximity of the transcription start site of the coding genes in the human genome. Sites were filtered to contain a preferential SPACE editing window (C3-C4-A5 with 1 being the most PAM-distal position) and a canonical NGG-PAM. B) Bar plots showing computationally determined number of genes (y-axis) that could be targeted by SPACE to install 1-5 (or more) transcription factor binding sites (x-axis) in proximity of the transcription start site of coding genes in the human genome for 4 transcription factors. Sites were filtered to contain a preferential SPACE editing window (C3-C4-A5) and a canonical NGG-PAM (Table A).

[0150] FIG. 9. Additional genome-wide analysis to detect possible CCA>TTG base edits in the human genome in gene promoters that could create transcription factor binding sites by using the dual-deaminase base editor SPACE (BE-SHAPE). Bar plots showing computationally determined number of genes (y-axis) that could be targeted by SPACE to install 1-5 (or more) transcription factor binding sites (x-axis) in proximity of the transcription start site of coding genes in the human genome for additional 6 transcription factors. Sites were filtered to contain a preferential SPACE editing window (C3-C4-A5) and a canonical NGG-PAM.

[0151] FIGS. 10A-C. Base editing with the dual-deaminase base editor SPACE establishes synthetic transcription factor binding sites at target promoters by installing highly complex combinatorial substitutions. A) Allele frequency table from next-generation sequencing (NGS) data shows one allele with SPACE-induced dual base edits (black rectangle; 3.32% frequency) that introduces a binding site for the transcription factor CEBPA in the promoter of the gene RCC1. Four more alleles with edits that might enhance TF binding but are less congruent to the canonical TF binding site are depicted in the rectangles with black dashed lines (frequencies of 30.18%, 2.47%, 2.09%, and 2.04% respectively). B) Allele frequency table from next-generation sequencing (NGS) data shows one allele with SPACE-induced dual base edits (black rectangle; 10.78% frequency) that introduces a binding site for the transcription factor NFIX in the promoter of the gene RARA. One more allele with edits that might enhance TF binding but is less congruent to the canonical TF binding site is depicted in the rectangle with black dashed lines (frequency of 1.96%). C) Allele frequency table from next-generation sequencing (NGS) data shows one allele with SPACE-induced dual base edits (black rectangle; 10.15% frequency) that introduces a binding site for the transcription factor PBX1 in the promoter of the gene IVD. One more allele with edits that might enhance TF binding but is less congruent to the canonical TF binding site is depicted in the rectangle with black dashed lines (frequency of 12.5%).

[0152] FIGS. 11A-C. Editing with the base editor SPACE results in gene expression changes of target genes (BE-SHAPE). A) Allele frequency table from next-generation sequencing (NGS) data shows two alleles with SPACE-induced dual base edits (black rectangles; 13.1% and 3% frequency, respectively) that introduce a binding site for the transcription factor NFIX in the promoter of the gene COMT. B) Allele frequency table from next-generation sequencing (NGS) data shows one allele with SPACE-induced dual base edits (black rectangles; 9.8% frequency) that introduce a binding site for the transcription factor CEBPA in the promoter of the gene SAE1.Three more alleles with edits that might enhance TF binding but are less congruent to the canonical TF binding site are depicted in the rectangles with black dashed lines (frequencies of 18.4%, 13.4%, and 3.0% respectively). C) Fold-change of expression (y-axis) observed in SPACE-edited HEK293T cells for five tested genes (x-axis). For each gene, nCas9 or SPACE (left and right bar) was targeted to the promoter region (˜500 bp to transcription start site, TSS) in two independent replicates, measured with 3 separate RT-qPCR measurements each. Dots represent separate RT-qPCR measurements. Error bars represent standard deviation (SD).

[0153] FIG. 12. Overview of the SHAPE workflow. The SHAPE strategy is aimed at introducing genetic edits to modify the gene expression of a target gene or genes at either the pre- or post-transcriptional level. A) Given a target gene or genes of interest (e.g. haploinsufficiency disease), the SHAPE pipeline identifies B) cell type-specific regulatory motifs (e.g. TF motifs, miRNA targets), C) genetic editors (e.g. nucleases, base editors, prime editors) to install these identified regulatory motifs with high precision, and D) regions to perform the precise genetic editing (e.g. promoters, enhancers, insulators, UTRs) to affect target gene(s) expression. Following the identification of these elements, E) precise genetic editing is performed to F) induce target gene(s) expression changes.

[0154] FIG. 13A-B. Stable MYOD1 expression by ELF motif insertion via prime editing but not with dCas9-VPR recruitment in HEK293T. A) Stable ELF(2×) motif insertion at the promoter of MYOD1 over 30 days post-transfection with prime editor (PE) and GFP construct. B) A comparison of PE and dCas9-VPR in stable activation of MYOD1 expression over 30 days post-transfection. U: unsorted, S: sorted

[0155] FIGS. 14A-B. Stable IL2RA expression by ELF motif insertion via prime editing but not with dCas9-VPR recruitment in HEK239T. A) Stable ELF(2×) motif insertion at the promoter of IL2RA over 30 days post-transfection with prime editor (PE) and GFP construct. B) A comparison of PE and dCas9-VPR in stable activation of IL2RA expression over 30 days post-transfection. U: unsorted, S: sorted

[0156] FIGS. 15A-B. Stable EpCAM expression by ELF motif insertion via prime editing but not with dCas9-VPR recruitment in HEK239T. A) Stable ELF(2×) motif insertion at the promoter of EpCAM over 30 days post-transfection with prime editor (PE) and GFP construct. B) A comparison of PE and dCas9-VPR in stable activation of EpCAM expression over 30 days post-transfection. U: unsorted, S: sorted

[0157] FIGS. 16A-B. Stable MYOD1 expression by ELF motif insertion via prime editing but not with dCas9-VPR recruitment in K562. A) Stable ELF(2×) motif insertion at the promoter of MYOD1 over 30 days post-transfection with prime editor (PE) and GFP construct. B) Prime editing led stable activation of MYOD1 expression over 30 days post-transfection. U: unsorted, S: sorted

[0158] FIGS. 17A-B. Stable HBB expression by ELF motif insertion via prime editing but not with dCas9-VPR recruitment in K562. A) Stable ELF(2×) motif insertion at the promoter of HBB over 30 days post-transfection with prime editor (PE) and GFP construct. B) Prime editing led stable activation of HBB expression over 30 days post-transfection. U: unsorted, S: sorted.

[0159] FIGS. 18A-B. Stable IL2RA expression by ELF motif insertion via prime editing but not with dCas9-VPR recruitment in K562. A) Stable ELF(2×) motif insertion at the promoter of IL2RA over 30 days post-transfection with prime editor (PE) and GFP construct. B) Prime editing led stable activation of IL2RA expression over 30 days post-transfection. U: unsorted, S: sorted

[0160] FIGS. 19A-C. Stable HER2 and protein expression by ELF motif insertion via prime editing but not with dCas9-VPR recruitment in K562. A) Stable ELF(2×) motif insertion at the promoter of HER2 over 30 days post-transfection with PE. B) Prime editing led stable activation of HER2 expression over 30 days post-transfection. C) A comparison of PE and dCas9-VPR in stable activation of HER2 protein expression. U: unsorted, S: sorted

[0161] FIGS. 20A-B. Stable IL2RA mRNA and protein expression by ELF motif insertion via prime editing but not with dCas9-VPR recruitment in K562. A) Stable ELF(2×) motif insertion at the promoter of IL2RA over 30 days post-transfection with PE. B) A comparison of PE and dCas9-VPR in stable activation of IL2RA protein expression. U: unsorted, S: sorted

[0162] FIGS. 21A-C. Stable EpCAM mRNA and protein expression by ELF motif insertion via prime editing but not with dCas9-VPR recruitment in HEK239T. A) Stable ELF(2×) motif insertion at the promoter of EpCAM over 30 days post-transfection with PE. B) A comparison of PE and dCas9-VPR in stable activation of EpCAM expression. C) A comparison of PE and dCas9-VPR in stable activation of EpCAM protein expression. U: unsorted, S: sorted

[0163] FIG. 22. Pooled screening of transcription factor cluster motif insertions via prime editing for activation and repression of IL2RA expression in HEK239T. A library of 100 archetype sequences derived from hierarchal-clustered transcription factor motifs (Table E) and relevant controls were inserted via prime editing into the IL2RA promoter to assess each motif's regulatory potential for either activation or repression of IL2RA expression. A total of 5 negative sequences, generated via a random sequence generator, were included in the screen to serve as negative controls (dark grey). A positive control of ELF(2×) motif was also included (black). Following prime editing of the insertion library, cells were sorted based on IL2RA protein expression at the cell surface into negative and positive populations. Next-generation DNA sequencing was performed to assess the proportion of each insertion sequence within the two populations and read counts were used to calculate enrichment (log 2 fold-change) for the insertion sequences.

[0164] FIG. 23. Pooled screening of single-base mutagenized ELF motif insertion via prime editing for tuneable IL2RA expression in HEK293T. A library of single-base mutagenized ELF(2×) motif sequences (Table F) were inserted via prime editing into the IL2RA promoter to assess single-base genetic variants of the ELF(2×) motif for the tuning of IL2RA expression. A total of 5 negative sequences, generated via a random sequence generator, were included in the screen to serve as negative controls (dark grey). A positive control of ELF(2×) motif was also included (black). Following prime editing of the insertion library, cells were sorted based on IL2RA protein expression at the cell surface into negative and positive populations. Next-generation DNA sequencing was performed to assess the proportion of each insertion sequence within the two populations and read counts were used to calculate enrichment (log 2 fold-change) for the inserted sequences.

### DETAILED DESCRIPTION

[0165] Precisely controlling gene expression in biosystems has important applications in biotechnology and therapeutic settings. Pre-transcriptional strategies for gene regulation include the use of artificial transcription factors (ATFs), whereas post-transcriptional strategies include targeted protein degradation (TPD) and RNA interference (RNAi). These gene regulation strategies are transient in nature and require re-dosing or constitutive expression of the exogenous biomolecules to have durable effect(s).

[0166] The regulation of endogenous gene expression is not a simple process, with dynamic transcriptional changes occurring across biological processes such as differentiation and disease. The DNA primary sequence plays a role in this gene regulation control, but how it encodes robust or dynamic gene expression modules is not clear. For example, many sequence motifs exist in the genome, however only a subset of these sequence motifs are bound by transcription factors. Previously, it was not clear that the introduction of a sequence motif into a new context can lead to the modification of gene expression.

[0167] Installing a single TF motif at an inactive promoter could lead to increased gene expression. It is well known that a lot of TFs work in concert to bring co-factors and RNA polymerases for gene expression, which might require complex TF motifs at the target promoters or enhancers.

[0168] Here we describe a strategy to introduce sequence motifs into non-endogenous contexts, where these sequence motifs recruit endogenous transcription factors that lead to the modification of gene expression. As shown herein, a single TF motif insertion modulates gene expression at a target gene. A single ELF motif which is ˜12 bp inserted at MYOD1 promoter increased ˜20 fold of MYOD1 gene expression in HEK293T. These results suggest we can modulate gene expression by introducing a single TF motif for endogenously active TF in cell types of interest and titrate gene expressions by inserting multiple copies of this single TF motif.

[0169] Described herein are strategies for the targeted modification (e.g., activation or repression) of gene expression in a stable and heritable manner, which we call Stable and Heritable Alteration by Precision Editing (SHAPE). The SHAPE methodology is based on the targeted and precise introduction of sequence motifs at regions in the genome that enable changes in target gene expression at either the pre-transcriptional or post-transcriptional level.

[0170] The SHAPE platform utilizes genetic modifiers (e.g., nucleases, (CRISPR guided) transposases, recombinases, base editors, and prime editors) to install specific sequence motifs at target sequences through precision genome engineering. Insertion and deletion (indel) mutations from programmable nucleases (e.g., zinc finger nucleases, transcription activator-like effector nucleases, Cas9, CasX, Cas12), base edits from cytosine and/or adenine base editors (e.g., CBEs, ABEs), and all types of prime edits from prime editors (e.g., SpCas9H840A-MMLV-RTPE3) can be utilized to introduce specific sequence motifs at target non-coding DNA sequences (e.g., promoters, enhancers, insulators) or coding (e.g., exons) to influence the gene expression or untranslated regions (UTRs) of target genes. The newly-introduced edits can take the form of different regulatory elements, including: transcription factor binding sites (TFBSs) that recruit endogenous transcription factors to modify target gene transcription, sequence modifications that alter the spacing of endogenous TFBSs, sequence elements that modify the stability (e.g., stabilize, de-stabilize) of target gene transcripts, or sequence compositions that modify target gene translation initiation and/or elongation. Following the introduction of these genetic edits, target gene expression can be modified in a stable and heritable fashion. If the newly introduced motif recruits endogenous transcriptional machinery (e.g., transcription factors), stabilizes the RNA of target genes, or drives expression of novel transcriptional products, the expression of target genes can be altered in a stable and heritable fashion.

[0171] SHAPE Platform

[0172] The SHAPE platform provides a framework, e.g., a computational (computer-implemented) framework, for the identification or generation of 1) functional DNA sequence motifs with regulatory potential, 2) target regions for sequence modification, and 3) genetic modifiers to use to ultimately achieve the precise installation of sequence motifs that induce targeted gene expression change(s) at the pre-transcriptional or post-transcriptional level. Overall, the SHAPE platform enables genetically-encoded gene regulation through the precise installation of sequence motifs within endogenous DNA sequence, offering a differentiated strategy for stable and heritable transcriptional modulation at the pre-transcriptional or post-transcriptional level with the transient expression of genetic modifiers.

[0173] An overview of different exemplary strategies of SHAPE for heritable targeted gene activation is outlined in Table 1, where gene activation strategies are mapped to the possible edit types. These edit types are then mapped to potential genetic modifiers that have the ability to introduce the specific edit in Table 2.

TABLE 1
Overview of SHAPE strategies

| | | | Gene expression | |
|---|---|---|---|---|
| | Level of | | modification | |
| System | regulation | Target elements | strategy | Edit type(s) |
| Mammalian, insect, | Pre- | Non-coding sequences | De novo TFBS | Substitution |
| bacterial, | transcriptional | (e.g., promoters, | creation | Insertion |
| plant, yeast | | enhancers, insulators, | | Deletion |
| | | silencer/repressors, | | Combination |
| | | introns) | TFBS sequence | Substitution |
| | | | modification(s) | |
| | | | TFBS spacing | Insertion |
| | | | modification(s) | Deletion |
| | | | | Combination |
| | Post- | 5′ and/or 3′ | Transcript | Substitution |
| | transcriptional | untranslated regions | stabilization/ | Insertion |
| | | (UTRs) | destabilization | Deletion |
| | | | | Combination |
| | | Coding sequences | Translation | Substitution |
| | | (e.g., translation start | initiation/elongation | Insertion |
| | | sites, codon | | Deletion |
| | | structures) | | Combination |

TABLE 2
Edit type breakdown with relevant genetic modifiers

| Edit type(s) | Specific edit type | Genetic modifier type |
|---|---|---|
| Substitution | Transition | Base editors, prime editors |
| | Transversion | Base editors, prime editors |
| | Mixed | Prime editors |
| Insertion | 1-2 bp | Nucleases, prime editors |
| | >2 bp | Prime editors, nucleases + ssODNs |
| | | (HDR), nucleases + dsODNs |
| | | (NHEJ) |
| Deletion | MMEJ-driven | Nucleases, prime editors |
| | Non-MMEJ | Dual nucleases, prime editors |
| Combination | Substitution, | Prime editors |
| | insertion, deletion | |
| Inversion | Inversion | Dual nucleases |

[0174] Generation of novel synthetic DNA sequence motifs that can recruit endogenous transcription factors can be done using a generative technique known as language modeling. A language model is typically a probability distribution over sequence of words that can occur in a natural language e.g., English or French. They are typically trained to predict the next word in a sentence. After training is done, the model can be used to generate novel sentences that are semantically meaningful. This type of modeling can also be used to generate de novo DNA sequences. The model typically uses a neural network where the layers consist of Long Short Term Memory (LSTM) units. The neural network can be trained on a large corpora of DNA sequences, and then fine-tuned on known DNA sequence motifs in a conditional manner to generate novel synthetic DNA motifs that are functional in terms of recruiting transcription factors.

[0175] The modification of endogenous transcription factor sequence composition by genetic editing is a viable strategy for gene activation. While transcription factors typically bind a core DNA sequence, there can be minor differences in the totality of sequences transcription factors bind across a genome. In addition to a range of different DNA sequences a transcription factor is capable of binding, the transcription factor may also exhibit different binding strength for each DNA sequence variant.′ The identification of the optimal binding sequence of transcription factors and downstream regulatory potential of this binding event can be determined through integration of chromatin accessibility (e.g., ATAC-seq, DNase-seq), protein-DNA interaction (e.g., ChIP-seq) and gene expression (e.g., RNA-seq) data. Following the identification of top DNA sequence binding motifs for all transcription factors, the identification of sub-optimal endogenous transcription factor binding motifs in cis-regulatory regions of a target gene can be performed. The utilization of genetic modifiers to introduce substitution edits (e.g., base editors, prime editors) can introduce more optimal transcription factor binding sites to promote heritable target gene activation.

[0176] Identification of Candidate Regulatory Sequence Motifs

[0177] The identification or generation of regulatory sequence motifs to be introduced into the genome can be determined through integrative analysis of by gene expression, chromatin accessibility, and/or DNA-protein interactions data, and de novo motif discovery, or generative neural network frameworks within a single cell type or set of cell types of interest. These sequence motifs can take the form of binding motifs for the recruitment of endogenous transcription factors, sequence motifs that promote the stabilization of RNA molecules, or sequence motifs that enable the expression of non-coding RNA for target gene repression.

[0178] Exemplary candidate regulatory sequence motifs can include one or more of a transcription factor binding sequence that has been determined experimentally in-vitro (e.g., SELEX)⁸, experimentally in-vivo (e.g., ChIP-seq, ChIP-qPCR)⁹, or computationally^{10 11} based on experimental data; a sequence motif that is not present in the genome of interest, but has been predicted to facilitate transcription factor binding; a known range for spacing between endogenous transcription factor binding sites that has been shown to modify gene expression; a predicted range for spacing between endogenous transcription factor binding sites that has been predicted to modify gene expression; a known sequence motif in the untranslated regions (UTR) of transcripts that increases or decreases the stability and/or affects the transcription of these RNA molecules in cells¹²; a sequence motif that is not present in the genome of interest, but has been predicted to modify the stability and/or affects the transcription of RNA molecules when placed in 5′ and/or 3′ untranslated regions (UTRs); a known target sequence for endogenous non-coding RNAs (e.g., miRNAs, siRNAs, lncRNAs) that affects the target transcript stability¹³; a sequence motif that is not present in the genome of interest, but has been predicted to recruit endogenous non-coding RNAs (e.g., miRNAs, siRNAs, lncRNAs) that affects the target transcript stability; a known sequence motif that modifies the translation initiation (e.g., Kozak sequence) or elongation (e.g., codon optimization) efficiency of transcripts¹⁴; a sequence motif that is not present in the genome of interest, but has been predicted to modify the translation initiation (e.g., Kozak sequence) or elongation (e.g., codon optimization) efficiency of transcripts; a sequence encoding a 2A self-cleaving peptide (e.g., T2A, P2A, E2A, F2A); and/or a sequence encoding an intein sequence.

[0179] A number of methods are known in the art for identifying candidate sequence motifs.

[0180] In some embodiments, the identification of candidate DNA sequence motifs is performed by integrative analysis of genomics data across different cell types and with a computational strategy we have recently proposed called Haystack¹⁵. First, regions of interest are uncovered based on their cell type specific activity for a particular class of functional regions and on genomic data e.g., chromatin marks (e.g., H3k27ac, H3k27me3), chromatin accessibility (e.g., DNase-seq or ATAC-seq) or DNA methylation. Second, based on the recovered regions and a list of known TF motifs, regions are searched for enriched patterns and their significance evaluated. Third, integrating gene expression data a short list of candidate TF are provided to account for their endogenous expression across the different cell types and their expected potency based on genes that are downstream of the regions uncovered in the second step. Finally, a ranked list of TF sequences is also generated based on this integrative approach for each cell type.

[0181] As previously described (Pinello et al. Bioinformatics 2018) by exploiting chromatin accessibility (or histone marks) and gene expression variability across cell types key regulatory regions and regulators were extracted that are cell type specific. By the integration of available data from large consortia (Roadmap Epigenomic and ENCODE projects) and using Haystack (github.com/pinellolab/haystack bio) we have curated a list of regions and transcription factors for several human primary cells and cell lines. Importantly, this strategy can be applied to any organism for which a reference genome is available.

[0182] In some embodiments, the discovery of the sequence motifs is done by de novo motif discovery analysis within a single cell type or set of cell types of interest.

[0183] In some embodiments, the discovery of sequence motifs is done by analyzing cis-regulatory DNA sequence composition of top-expressing genes (e.g., top 1%, 5%, 20%, 50%) ranked by normalized expression values (e.g., RPKM, FPKM, TPM, fold-change) in a single cell type or set of cell types of interest.

[0184] In some embodiments, the discovery of the sequence motifs is done by analyzing cis-regulatory DNA sequence composition of bottom-expressing genes (e.g., bottom 1%, 5%, 20%, 50%) ranked by normalized expression values (e.g., RPKM, FPKM, TPM, fold-change) in a single cell type or set of cell types of interest.

[0185] In some embodiments, the discovery of the sequence motifs is done through frequency-based methods including the construction of position-weight matrices for a single cell type or set of cell types of interest.

[0186] In some embodiments, the discovery of the sequence motifs is done through neural network architectures to identify sequence motifs that may or may not exist in a single cell type or set of cell types of interest.

[0187] In some embodiments, the discovery of the sequence motifs is done through generation of synthetic DNA sequences using language models—a generative deep learning technique—where the sequence motifs may or may not exist in a single cell type or set of cell types of interest.

[0188] In some embodiments, the discovery of the sequence motifs is done through generation of synthetic DNA sequences using deep variational autoencoders—a generative deep learning model—where the sequence motifs may or may not exist in a single cell type or set of cell types of interest.

[0189] In some embodiments, the discovery of the sequence motifs is done through generation of synthetic DNA sequences using Generative Adversarial Networks (GANs)—a generative deep learning model—where the sequence motifs may or may not exist in a single cell type or set of cell types of interest.

[0190] In some embodiments, the discovery of the sequence motifs is done through the identification of transcription factor binding sequence motifs with dependencies with other sequence motifs (e.g., pairwise, triwise interactions)¹⁶.

[0191] In some embodiments, the discovery of the sequence motifs is done through the identification of transcription factor binding sequence motifs that recruit additional transcriptional machinery through protein-protein interactions.

[0192] In addition, a number of regulatory sequence motifs, e.g., transcription factors and transcription factor binding sequence motifs, are known, including those that are cell-type specific and those that are hormone responsive. For example, Table 3A provides a list of TFs and their entry number in the JASPAR database, which provides their recognition sequences.

[0193] Activating target genes in a cell-type-specific manner can be achieved by recruiting cell-type specific endogenous TFs (many of which are known in the art) at the promoters, enhancers or both of genes of interest. First, a list of cell-type-specific TFs for the target cell lines can be determined based on the expression levels from RNA-seq of native cell lines³³. Second, individual or repeats of a cell-type specific TF motif or combination of multiple TF motifs can be introduced at the promoters, enhancers or both of genes of interest in the target cell lines via genetic modifiers. For controls, cell lines that do not or lowly express cell-type-specific TFs that express in target cell lines should be tested to see if target genes are not expressed even though same genomic modifications were installed.

[0194] A number of databases provide lists of cell-specific transcription factors, including TRANSFAC and TFregulome®; see also D'Alessio, A. C. et al. A Systematic Approach to Identify Candidate Transcription Factors that Control Cell Identity. Stem Cell Reports 5, 763-Instead of the recruitment of endogenous transcription factors, SHAPE can also be used to introduce de novo transcription factor binding sites that act as response elements for TFs or TF-like proteins that can be activated (e.g., by expression or reduced degradation) by an exogenous small molecule, hormone or drug following the subsequent addition of the exogenous small molecule, hormone, or drug. Upon induction of this exogenous ligand, the response element would recruit the receptor-exogenous ligand complexes to the target locus and give rise to target gene activation. Examples include the use of vitamin D that interact with vitamin D receptor (VDR) transcription factor by installing VDR response motif at the promoters or enhancers at target genes of interest.

[0195] Table 3B provides a list of examples of hormone responsive transcription factors and elements.

TABLE 3A
Examples of transcription factors from the JASPAR database that
may be recruited using SHAPE

| JASPAR ID | Transcription factor |
|---|---|
| MA0206.1 | abd-A |
| MA0165.1 | Abd-B |
| MA0265.1 | ABF1 |
| MA0570.2 | ABF1 |
| MA0266.1 | ABF2 |
| MA0941.1 | ABF2 |
| MA0930.1 | ABF3 |
| MA1659.1 | ABF4 |
| MA0564.1 | ABI3 |
| MA0123.1 | abi4 |
| MA0931.1 | ABI5 |
| MA1244.1 | ABR1 |
| MA0267.1 | ACE2 |
| MA0207.1 | achi |
| MA1277.1 | Adof1 |
| MA0268.1 | ADR1 |
| MA0269.1 | AFT1 |
| MA0270.1 | AFT2 |
| MA0005.2 | AG |
| MA0585.1 | AGL1 |
| MA1204.1 | AGL13 |
| MA0548.2 | AGL15 |
| MA1199.1 | AGL16 |
| MA1200.1 | AGL25 |
| MA1012.1 | AGL27 |
| MA0001.2 | AGL3 |
| MA1201.1 | AGL42 |
| MA1202.1 | AGL55 |
| MA1205.1 | AGL6 |
| MA1203.1 | AGL63 |
| MA0932.1 | AHL12 |
| MA0933.1 | AHL20 |
| MA0934.1 | AHL25 |
| MA0006.1 | Ahr::Arnt |
| MA0959.1 | AIB |
| MA1235.1 | AIL7 |
| MA0208.1 | al |
| MA0854.1 | Alx1 |
| MA0634.1 | ALX3 |
| MA0853.1 | Alx4 |
| MA1663.1 | ANAC050 |
| MA1660.1 | ANAC13 |
| MA1375.1 | ANL2 |
| MA0571.1 | ANT |
| MA0166.1 | Antp |
| MA0209.1 | ap |
| MA0940.1 | AP1 |
| MA0556.1 | AP3 |
| MA0007.3 | Ar |
| MA0210.1 | ara |
| MA1098.1 | ARALYDRAFT_484486 |
| MA1097.1 | ARALYDRAFT_493022 |
| MA1095.1 | ARALYDRAFT_495258 |
| MA1096.1 | ARALYDRAFT_496250 |
| MA1054.1 | ARALYDRAFT_897773 |
| MA1338.1 | AREB3 |
| MA0942.1 | ARF1 |
| MA1685.1 | ARF10 |
| MA1686.1 | ARF13 |
| MA1687.1 | ARF14 |
| MA1688.1 | ARF16 |
| MA1689.1 | ARF18 |
| MA1206.1 | ARF2 |
| MA1690.1 | ARF25 |
| MA1691.1 | ARF27 |
| MA1692.1 | ARF29 |
| MA1009.1 | ARF3 |
| MA1693.1 | ARF34 |
| MA1694.1 | ARF35 |
| MA1695.1 | ARF36 |
| MA1696.1 | ARF39 |
| MA1697.1 | ARF4 |
| MA0943.1 | ARF5 |
| MA1698.1 | ARF7 |
| MA0944.1 | ARF8 |
| MA0271.1 | ARG80 |
| MA0272.1 | ARG81 |
| MA1463.1 | ARGFX |
| MA0151.1 | Arid3a |
| MA0601.1 | Arid3b |
| MA0602.1 | Arid5a |
| MA0004.1 | Arnt |
| MA0259.1 | ARNT::HIF1A |
| MA1464.1 | ARNT2 |
| MA0603.1 | Amtl |
| MA0273.1 | ARO80 |
| MA0274.1 | ARR1 |
| MA0945.1 | ARR1 |
| MA0121.1 | ARR10 |
| MA0946.1 | ARR11 |
| MA0947.1 | ARR14 |
| MA0948.1 | ARR18 |
| MA0949.1 | ARR2 |
| MA0874.1 | Arx |
| MA1100.2 | ASCL1 |
| MA1631.1 | ASCL1(var. 2) |
| MA0816.1 | Ascl2 |
| MA0275.1 | ASG1 |
| MA0276.1 | ASH1 |
| MA1661.1 | AT-GTL1 |
| MA1259.1 | AT1G01250 |
| MA1387.1 | AT1G13300 |
| MA1160.1 | AT1G14580 |
| MA1400.1 | At1g19000 |
| MA1255.1 | AT1G22810 |
| MA1263.1 | AT1G36060 |
| MA1222.1 | AT1G44830 |
| MA1275.1 | AT1G47655 |
| MA1186.1 | At1g49010 |
| MA1268.1 | AT1G69570 |
| MA1288.1 | At1g72010 |
| MA1353.1 | AT1G72740 |
| MA1397.1 | At1g74840 |
| MA1250.1 | AT1G75490 |
| MA1367.1 | AT1G76870 |
| MA1366.1 | AT1G76880 |
| MA1260.1 | AT1G77640 |
| MA1380.1 | AT2G20110 |
| MA1272.1 | AT2G28810 |
| MA1245.2 | AT2G33710 |
| MA1193.1 | At2g38090 |
| MA1385.1 | AT2G40260 |
| MA1229.1 | AT2G44940 |
| MA1285.1 | At2g45680 |
| MA1182.1 | At3g09600 |
| MA1662.1 | AT3G10030 |
| MA1191.1 | AT3G10113 |
| MA1194.1 | AT3G10580 |
| MA1188.1 | At3g11280 |
| MA1253.1 | AT3G16280 |
| MA1388.1 | AT3G24120 |
| MA1270.1 | AT3G45610 |
| MA1381.1 | AT3G46070 |
| MA1276.1 | AT3G52440 |
| MA1242.1 | AT3G57600 |
| MA1354.1 | AT4G12670 |
| MA1237.1 | AT4G16750 |
| MA1228.1 | AT4G18450 |
| MA1232.1 | AT4G28140 |
| MA1241.1 | AT4G32800 |
| MA1281.1 | AT5G02460 |
| MA1196.1 | At5g05790 |
| MA1399.1 | At5g08520 |
| MA1226.1 | AT5G18450 |
| MA1365.2 | AT5G47660 |
| MA1195.1 | AT5G56840 |
| MA1192.1 | At5g58900 |
| MA1189.1 | AT5G61620 |
| MA1267.1 | AT5G66940 |
| MA1261.1 | AT5G67000 |
| MA1438.1 | atf-7 |
| MA0604.1 | Atf1 |
| MA1632.1 | ATF2 |
| MA0605.2 | ATF3 |
| MA0833.2 | ATF4 |
| MA1466.1 | ATF6 |
| MA834.1 | ATF7 |
| MA0950.1 | ATHB-12 |
| MA0951.1 | ATHB-16 |
| MA0110.3 | ATHB-5 |
| MA0952.1 | ATHB-51 |
| MA0953.1 | ATHB-6 |
| MA0573.1 | ATHB-9 |
| MA1212.1 | ATHB13 |
| MA1026.2 | ATHB15 |
| MA1211.1 | ATHB18 |
| MA1209.1 | ATHB20 |
| MA1327.2 | ATHB23 |
| MA1328.1 | ATHB34 |
| MA1406.1 | ATHB4 |
| MA1214.1 | ATHB40 |
| MA1215.1 | ATHB53 |
| MA0954.2 | ATHB7 |
| MA0461.2 | Atoh1 |
| MA1467.1 | ATOH1(var. 2) |
| MA1468.1 | ATOH7 |
| MA0167.1 | Awh |
| MA0277.1 | AZF1 |
| MA0168.1 | B-H1 |
| MA0169.1 | B-H2 |
| MA1633.1 | BACH1 |
| MA0591.1 | Bach1::Mafk |
| MA1101.2 | BACH 2 |
| MA1470.1 | BACH2(var. 2) |
| MA0211.1 | bap |
| MA0877.2 | BARHL1 |
| MA0635.1 | BARHL2 |
| MA0875.1 | BARX1 |
| MA1471.1 | BARX2 |
| MA0278.1 | BAS1 |
| MA1634.1 | BATF |
| MA0462.2 | BATF::JUN |
| MA0835.2 | BATF3 |
| MA0212.1 | bcd |
| MA0463.2 | BCL6 |
| MA0731.1 | BCL6B |
| MA0529.2 | BEAF-32 |
| MA0956.1 | BEE2 |
| MA1332.1 | BEH2 |
| MA1333.1 | BEH3 |
| MA1331.1 | BEH4 |
| MA0242.1 | Bgb::run |
| MA0960.1 | BHLH104 |
| MA0961.1 | BHLH112 |
| MA0958.1 | BHLH13 |
| MA1358.1 | bHLH130 |
| MA1361.1 | bHLH18 |
| MA0957.1 | BHLH3 |
| MA1359.1 | bHLH31 |
| MA0962.1 | BHLH34 |
| MA1363.1 | bHLH69 |
| MA1360.1 | bHLH74 |
| MA1362.1 | bHLH77 |
| MA0963.1 | BHLH78 |
| MA1357.1 | bHLH80 |
| MA0607.1 | Bhlha15 |
| MA1472.1 | BHLHA15(var. 2) |
| MA0818.1 | BHLHE22 |
| MA1635.1 | BHLHE22(var. 2) |
| MA0817.1 | BHLHE23 |
| MA0464.2 | BHLHE40 |
| MA0636.1 | BHLHE41 |
| MA0964.1 | BIM1 |
| MA0965.1 | BIM2 |
| MA0966.1 | BIM3 |
| MA0537.1 | blmp-1 |
| MA1404.1 | BPC1 |
| MA1403.1 | BPC5 |
| MA1402.1 | BPC6 |
| MA0010.1 | br |
| MA0011.1 | br(var. 2) |
| MA0012.1 | br(var. 3) |
| MA0013.1 | br(var. 4) |
| MA0213.1 | brk |
| MA0214.1 | bsh |
| MA0876.1 | BSX |
| MA0443.1 | btd |
| MA0215.1 | btn |
| MA1407.1 | bZIP14 |
| MA1349.1 | bZIP16 |
| MA1344.1 | bZIP28 |
| MA1340.1 | bZIP3 |
| MA1350.1 | bZIP42 |
| MA1339.1 | bZIP43 |
| MA1337.1 | bZIP44 |
| MA1345.1 | bZIP48 |
| MA1342.1 | bZIP50 |
| MA1343.1 | bZIP52 |
| MA1341.1 | bZIP53 |
| MA0967.1 | BZIP60 |
| MA0968.2 | bZIP68 |
| MA0096.1 | bZIP910 |
| MA0097.1 | bZIP911 |
| MA0550.2 | BZR1 |
| MA0549.1 | BZR2 |
| MA0170.1 | C15 |
| MA0216.2 | cad |
| MA0279.1 | CAD1 |
| MA1197.1 | CAMTA1 |
| MA0280.1 | CAT8 |
| MA0217.1 | caup |
| MA0281.1 | CBF1 |
| MA1224.1 | CBF1 |
| MA1217.1 | CBF2 |
| MA1218.1 | CBF4 |
| MA0972.1 | CCA1 |
| MA0579.1 | CDC5 |
| MA0973.1 | CDF2 |
| MA0974.2 | CDF3 |
| MA0878.2 | CDX1 |
| MA0465.2 | CDX2 |
| MA1473.1 | CDX4 |
| MA1444.1 | cebp-1 |
| MA0102.4 | CEBPA |
| MA0466.2 | CEBPB |
| MA0836.2 | CEBPD |
| MA0837.1 | CEBPE |
| MA0838.1 | CEBPG |
| MA1636.1 | CEBPG(var. 2) |
| MA0263.1 | ceh-10::ttx-3 |
| MA0264.1 | ceh-22 |
| MA1445.1 | ceh-28 |
| MA1699.1 | ceh-38 |
| MA0921.1 | ceh-48 |
| MA1219.1 | CEJ1 |
| MA0637.1 | CENPB |
| MA0282.1 | CEP3 |
| MA0922.1 | ces-2 |
| MA0015.1 | Cf2 |
| MA0171.1 | CG11085 |
| MA0172.1 | CG11294 |
| MA0173.1 | CG11617 |
| MA0176.1 | CG15696-RA |
| MA0177.1 | CG18599 |
| MA0178.1 | CG32105 |
| MA0179.1 | CG32532 |
| MA0444.1 | CG34031 |
| MA0182.1 | CG4328-RA |
| MA0184.1 | CG9876 |
| MA0283.1 | CHA4 |
| MA0260.1 | che-1 |
| MA0284.1 | CIN5 |
| MA1700.1 | Clamp |
| MA0819.1 | CLOCK |
| MA0969.1 | CMTA2 |
| MA0970.1 | CMTA3 |
| MA0530.1 | cnc::maf-S |
| MA1279.1 | COG1 |
| MA1432.1 | cre-1 |
| MA0018.4 | CREB1 |
| MA0638.1 | CREB3 |
| MA0839.1 | CREB3L1 |
| MA0608.1 | Creb3l2 |
| MA1474.1 | CREB3L4 |
| MA1475.1 | CREB3L4(var. 2) |
| MA0840.1 | Creb5 |
| MA0609.2 | CREM |
| MA0975.1 | CRF2 |
| MA0976.2 | CRF4 |
| MA0467.1 | Crx |
| MA0285.1 | CRZ1 |
| MA0286.1 | CST6 |
| MA0218.1 | Ct |
| MA0139.1 | CTCF |
| MA0531.1 | CTCF |
| MA1102.2 | CTCFL |
| MA0287.1 | CUP2 |
| MA0288.1 | CUP9 |
| MA0754.1 | CUX1 |
| MA0755.1 | CUX2 |
| MA0445.1 | D |
| MA0538.1 | daf-12 |
| MA1446.1 | daf-16 |
| MA1271.1 | DAG2 |
| MA0289.1 | DAL80 |
| MA0290.1 | DAL81 |
| MA0291.1 | DAL82 |
| MA0639.1 | DBP |
| MA0174.1 | Dbx |
| MA0019.1 | Ddit3::Cebpa |
| MA0185.1 | Deaf1 |
| MA1376.1 | DEAR3 |
| MA1251.1 | DEAR5 |
| MA0186.1 | Dfd |
| MA0022.1 | dl |
| MA0023.1 | dl(var. 2) |
| MA0187.1 | Dll |
| MA0879.1 | Dlx1 |
| MA0885.1 | Dlx2 |
| MA0880.1 | Dlx3 |
| MA0881.1 | Dlx4 |
| MA1476.1 | DLX5 |
| MA0882.1 | DLX6 |
| MA0883.1 | Dmbx1 |
| MA1603.1 | Dmrt1 |
| MA0610.1 | DMRT3 |
| MA1455.1 | dmrt99B |
| MA1478.1 | DMRTA2 |
| MA1479.1 | DMRTC2 |
| MA0981.1 | DOF1.8 |
| MA0020.1 | Dof2 |
| MA0982.1 | DOF2.4 |
| MA0977.1 | DOF2.5 |
| MA0021.1 | Dof3 |
| MA1273.1 | dof4.2 |
| MA1269.1 | dof4.5 |
| MA1071.1 | DOF5.3 |
| MA0983.1 | DOF5.6 |
| MA0984.1 | DOF5.7 |
| MA0351.1 | DOT6 |
| MA1668.1 | DPBF3 |
| MA1480.1 | DPRX |
| MA0540.1 | dpy-27 |
| MA0188.1 | Dr |
| MA0985.1 | DRE1C |
| MA1243.1 | DREB19 |
| MA0971.1 | DREB1A |
| MA1669.1 | DREB1B |
| MA1670.1 | DREB1C |
| MA0978.1 | DREB1E |
| MA1032.1 | DREB1G |
| MA1258.1 | DREB2 |
| MA1248.1 | DREB26 |
| MA0986.1 | DREB2C |
| MA1456.1 | Dref |
| MA1481.1 | DRGX |
| MA0919.1 | dsc-1 |
| MA0611.1 | Dux |
| MA0468.1 | DUX4 |
| MA0884.1 | DUXA |
| MA0915.1 | dve |
| MA0580.1 | DYT1 |
| MA0024.3 | E2F1 |
| MA0864.2 | E2F2 |
| MA0469.3 | E2F3 |
| MA0470.2 | E2F4 |
| MA0471.2 | E2F6 |
| MA0758.1 | E2F7 |
| MA0865.1 | E2F8 |
| MA1414.1 | E2FA |
| MA0189.1 | E5 |
| MA0154.4 | EBF1 |
| MA1604.1 | Ebf2 |
| MA1637.1 | EBF3 |
| MA0292.1 | ECM22 |
| MA0293.1 | ECM23 |
| MA0534.1 | EcR::usp |
| MA0294.1 | EDS1 |
| MA0990.1 | EDT1 |
| MA0541.1 | efl-1 |
| MA1167.1 | EFM |
| MA0162.4 | EGR1 |
| MA0472.2 | EGR2 |
| MA0732.1 | EGR3 |
| MA0733.1 | EGR4 |
| MA0598.3 | EHF |
| MA0026.1 | Eip74EF |
| MA0473.3 | ELF1 |
| MA1483.1 | ELF2 |
| MA0640.2 | ELF3 |
| MA0641.1 | ELF4 |
| MA0136.2 | ELF5 |
| MA0028.2 | ELK1 |
| MA0759.1 | ELK3 |
| MA0076.2 | ELK4 |
| MA1701.1 | elt-2 |
| MA0542.1 | elt-3 |
| MA1439.1 | elt-6 |
| MA0128.1 | EmBP-1 |
| MA0219.1 | ems |
| MA0612.2 | EMXI |
| MA0886.1 | EMX2 |
| MA0220.1 | en |
| MA0027.2 | EN1 |
| MA0642.1 | EN2 |
| MA0800.1 | EOMES |
| MA0543.1 | eor-1 |
| MA1401.1 | EPR1 |
| MA0760.1 | ERF |
| MA0979.1 | ERF008 |
| MA1265.2 | ERF015 |
| MA1234.1 | ERF017 |
| MA1048.1 | ERF018 |
| MA1424.1 | ERF019 |
| MA1233.2 | ERF021 |
| MA1227.2 | ERF027 |
| MA1223.1 | ERF035 |
| MA1230.1 | ERF037 |
| MA0995.2 | ERF039 |
| MA0996.1 | ERF043 |
| MA0997.1 | ERF069 |
| MA1247.1 | ERF087 |
| MA1049.1 | ERF094 |
| MA0998.1 | ERF096 |
| MA0999.1 | ERF098 |
| MA1240.1 | ERF10 |
| MA1239.1 | ERF104 |
| MA1000.2 | ERF105 |
| MA1053.1 | ERF109 |
| MA1001.2 | ERF11 |
| MA1002.1 | ERF112 |
| MA1671.1 | ERF118 |
| MA1004.1 | ERF13 |
| MA1231.1 | ERF15 |
| MA0567.1 | ERF1B |
| MA1262.1 | ERF2 |
| MA1005.2 | ERF3 |
| MA1238.2 | ERF38 |
| MA0992.2 | ERF4 |
| MA1225.1 | ERF5 |
| MA1006.1 | ERF6 |
| MA0993.1 | ERF7 |
| MA0994.1 | ERF8 |
| MA1257.1 | ERF9 |
| MA0474.2 | ERG |
| MA0420.1 | ERT1 |
| MA1264.1 | ESE1 |
| MA1236.1 | ESE3 |
| MA0112.3 | ESR1 |
| MA0258.2 | ESR2 |
| MA0592.3 | ESRRA |
| MA0141.3 | ESRRB |
| MA0643.1 | Esrrg |
| MA0644.1 | ESX1 |
| MA0098.3 | ETS1 |
| MA1484.1 | ETS2 |
| MA0916.1 | Ets21C |
| MA0761.2 | ETV1 |
| MA0762.1 | ETV2 |
| MA0763.1 | ETV3 |
| MA0764.2 | ETV4 |
| MA0765.2 | ETV5 |
| MA0645.1 | ETV6 |
| MA0221.1 | eve |
| MA0887.1 | EVX1 |
| MA0888.1 | EVX2 |
| MA0149.1 | EWSR1-FLI1 |
| MA0222.1 | exd |
| MA0224.1 | exex |
| MA0575.1 | F3A4.140 |
| MA1408.1 | FaEOBII |
| MA1382.1 | FAR1 |
| MA1485.1 | FERD3L |
| MA0156.2 | FEV |
| MA0295.1 | FHL1 |
| MA0557.1 | FHY3 |
| MA0820.1 | FIGLA |
| MA0446.1 | fkh |
| MA0920.1 | fkh-2 |
| MA1440.1 | fkh-9 |
| MA0296.1 | FKH1 |
| MA0297.1 | FKH2 |
| MA0558.1 | FLC |
| MA0475.2 | FLI1 |
| MA0476.1 | FOS |
| MA1448.1 | fos-1 |
| MA0099.3 | FOS::JUN |
| MA1126.1 | FOS::JUN(var. 2) |
| MA1134.1 | FOS::JUNB |
| MA1141.1 | FOS::JUND |
| MA1127.1 | FOSB::JUN |
| MA1135.1 | FOSB::JUNB |
| MA1136.1 | FOSB::JUNB(var. 2) |
| MA0477.2 | FOSL1 |
| MA1128.1 | FOSL1::JUN |
| MA1129.1 | FOSLl::JUN(var. 2) |
| MA1137.1 | FOSL1::JUNB |
| MA1142.1 | FOSL1::JUND |
| MA1143.1 | FOSLl::JUND(var. 2) |
| MA0478.1 | FOSL2 |
| MA1130.1 | FOSL2::JUN |
| MA1131.1 | FOSL2::JUN(var. 2) |
| MA1138.1 | FOSL2::JUNB |
| MA1139.1 | FOSL2::JUNB(var. 2) |
| MA1144.1 | FOSL2::JUND |
| MA1145.1 | FOSL2::JUND(var. 2) |
| MA0148.4 | FOXA1 |
| MA0047.3 | FOXA2 |
| MA1683.1 | FOXA3 |
| MA0845.1 | FOXB1 |
| MA0032.2 | FOXC1 |
| MA0846.1 | FOXC2 |
| MA0031.1 | FOXD1 |
| MA0847.2 | FOXD2 |
| MA0041.1 | Foxd3 |
| MA1487.1 | FOXE1 |
| MA1606.1 | Foxf1 |
| MA0030.1 | FOXF2 |
| MA0613.1 | FOXG1 |
| MA0479.1 | FOXH1 |
| MA0042.2 | FOXl1 |
| MA0614.1 | Foxj2 |
| MA0851.1 | Foxj3 |
| MA0852.2 | FOXK1 |
| MA1103.2 | FOXK2 |
| MA0033.2 | FOXL1 |
| MA1607.1 | Foxl2 |
| MA1684.1 | Foxn1 |
| MA1489.1 | FOXN3 |
| MA0480.1 | Foxo1 |
| MA0157.2 | FOXO3 |
| MA0848.1 | FOXO4 |
| MA0849.1 | FOXO6 |
| MA0481.3 | FOXP1 |
| MA0593.1 | FOXP2 |
| MA0850.1 | FOXP3 |
| MA0040.1 | Foxq1 |
| MA0225.1 | ftz |
| MA0565.2 | FUS3 |
| MA0298.1 | FZF1 |
| MA0062.3 | GABPA |
| MA0299.1 | GAL4 |
| MA0034.1 | Gam1 |
| MA0300.1 | GAT1 |
| MA0301.1 | GAT3 |
| MA0302.1 | GAT4 |
| MA0035.4 | GATA1 |
| MA0140.2 | GATA1::TAL1 |
| MA1013.1 | GATA10 |
| MA1014.1 | GATA11 |
| MA1015.1 | GATA12 |
| MA1325.1 | GATA14 |
| MA1016.1 | GATA15 |
| MA1323.1 | GATA19 |
| MA0036.3 | GATA2 |
| MA1324.1 | GATA20 |
| MA0037.3 | GATA3 |
| MA0482.2 | GATA4 |
| MA0766.2 | GATA5 |
| MA1396.1 | GATA6 |
| MA1104.2 | GATA6 |
| MA1017.1 | GATA8 |
| MA1018.1 | GATA9 |
| MA1672.1 | GBF2 |
| MA1351.1 | GBF3 |
| MA1334.1 | GBF6 |
| MA0889.1 | GBX1 |
| MA0890.1 | GBX2 |
| MA0646.1 | GCM1 |
| MA0767.1 | GCM2 |
| MA0917.1 | gcm2 |
| MA0303.1 | GCN4 |
| MA0304.1 | GCR1 |
| MA0305.1 | GCR2 |
| MA0038.2 | GFl1 |
| MA0483.1 | Gfi1b |
| MA0306.1 | GIS1 |
| MA0734.2 | GLI2 |
| MA1491.1 | GLI3 |
| MA0735.1 | GLIS1 |
| MA0736.1 | GLIS2 |
| MA0737.1 | GLIS3 |
| MA0307.1 | GLN3 |
| MA1019.1 | Glyma19g26560.1 |
| MA0615.1 | Gmeb1 |
| MA0862.1 | GMEB2 |
| MA1457.1 | grh |
| MA0647.1 | GRHL1 |
| MA1105.2 | GRHL2 |
| MA0190.1 | Gsc |
| MA0648.1 | GSC |
| MA0891.1 | GSC2 |
| MA0308.1 | GSM1 |
| MA0892.1 | GSX1 |
| MA0893.2 | GSX2 |
| MA0447.1 | gt |
| MA1020.1 | GT-1 |
| MA1208.1 | GT-2 |
| MA1368.2 | GT-4 |
| MA1207.1 | GT-A3 |
| MA0309.1 | GZF3 |
| MA0449.1 | h |
| MA0448.1 | H2.0 |
| MA0310.1 | HAC1 |
| MA0311.1 | HAL9 |
| MA0092.1 | Hand1::Tcf3 |
| MA1638.1 | HAND2 |
| MA0312.1 | HAP1 |
| MA0313.1 | HAP2 |
| MA0314.1 | HAP3 |
| MA0316.1 | HAP5 |
| MA1024.1 | HAT1 |
| MA1198.1 | HAT2 |
| MA1210.1 | HAT22 |
| MA0008.2 | HAT5 |
| MA0049.1 | hb |
| MA1025.1 | HBI1 |
| MA0226.1 | hbn |
| MA0317.1 | HCM1 |
| MA1369.1 | HDG1 |
| MA1099.2 | HES1 |
| MA0616.2 | HES2 |
| MA0821.1 | HES5 |
| MA1493.1 | HES6 |
| MA0822.1 | HES7 |
| MA0894.1 | HESX1 |
| MA0823.1 | HEY1 |
| MA0649.1 | HEY2 |
| MA0191.1 | HGTX |
| MA0183.1 | HHEX |
| MA1390.1 | HHO2 |
| MA1386.1 | HHO3 |
| MA1164.1 | HHO5 |
| MA1165.1 | HHO6 |
| MA0739.1 | Hic1 |
| MA0738.1 | HIC2 |
| MA1106.1 | HIF1A |
| MA0131.2 | HINFP |
| MA0450.1 | hkb |
| MA0043.3 | HLF |
| MA0545.1 | hlh-1 |
| MA1449.1 | hlh-30 |
| MA0109.1 | HLTF |
| MA0895.1 | HMBOX1 |
| MA0044.1 | HMG-1 |
| MA0045.1 | HMG-I/Y |
| MA0327.1 | HMRAl |
| MA0318.1 | HMRA2 |
| MA0192.1 | Hmx |
| MA0896.1 | Hmx1 |
| MA0897.1 | Hmx2 |
| MA0898.1 | Hmx3 |
| MA0046.2 | HNF1A |
| MA0153.2 | HNF1B |
| MA0114.4 | HNF4A |
| MA1494.1 | HNF4A(var. 2) |
| MA0484.2 | HNF4G |
| MA1495.1 | HOXA1 |
| MA0899.1 | HOXA10 |
| MA0911.1 | Hoxa11 |
| MA0650.2 | HOXA13 |
| MA0900.2 | HOXA2 |
| MA1496.1 | HOXA4 |
| MA0158.2 | HOXA5 |
| MA1497.1 | HOXA6 |
| MA1498.1 | HOXA7 |
| MA0594.2 | HOXA9 |
| MA0901.2 | HOXB13 |
| MA0902.2 | HOXB2 |
| MA0903.1 | HOXB3 |
| MA1499.1 | HOXB4 |
| MA0904.2 | HOXB5 |
| MA1500.1 | HOXB6 |
| MA1501.1 | HOXB7 |
| MA1502.1 | HOXB8 |
| MA1503.1 | HOXB9 |
| MA0905.1 | HOXC10 |
| MA0651.1 | HOXC11 |
| MA0906.1 | HOXC12 |
| MA0907.1 | HOXC13 |
| MA1504.1 | HOXC4 |
| MA1505.1 | HOXC8 |
| MA0485.2 | HOXC9 |
| MA1506.1 | HOXD10 |
| MA0908.1 | HOXD11 |
| MA0873.1 | HOXD12 |
| MA0909.2 | HOXD13 |
| MA0912.2 | HOXD3 |
| MA1507.1 | HOXD4 |
| MA0910.2 | HOXD8 |
| MA0913.2 | HOXD9 |
| MA1458.1 | Hsf |
| MA0319.1 | HSF1 |
| MA0486.2 | HSF1 |
| MA0770.1 | HSF2 |
| MA0771.1 | HSF4 |
| MA1664.1 | HSFA6B |
| MA1665.1 | HSFB2A |
| MA1666.1 | HSFB2B |
| MA1667.1 | HSFC1 |
| MA0227.1 | hth |
| MA0551.1 | HY5 |
| MA1425.1 | HYH |
| MA0120.1 | id1 |
| MA1373.1 | IDD2 |
| MA1371.1 | IDD4 |
| MA1370.1 | IDD5 |
| MA1374.1 | IDD7 |
| MA1508.1 | IKZF1 |
| MA0320.1 | IME1 |
| MA0228.1 | ind |
| MA0321.1 | INO2 |
| MA0322.1 | INO4 |
| MA0155.1 | INSM1 |
| MA0229.1 | inv |
| MA0050.2 | IRF1 |
| MA0051.1 | IRF2 |
| MA1418.1 | IRF3 |
| MA1419.1 | IRF4 |
| MA1420.1 | IRF5 |
| MA1509.1 | IRF6 |
| MA0772.1 | IRF7 |
| MA0652.1 | IRF8 |
| MA0653.1 | IRF9 |
| MA1608.1 | Isl1 |
| MA0914.1 | ISL2 |
| MA0654.1 | ISX |
| MA0323.1 | IXRI |
| MA0655.1 | JDP2 |
| MA0656.1 | JDP2(var. 2) |
| MA1156.1 | JKD |
| MA0488.1 | JUN |
| MA1132.1 | JUN::JUNB |
| MA1133.1 | JUN::JUNB(var. 2) |
| MA0489.1 | JUN(var. 2) |
| MA0490.2 | JUNB |
| MA1140.2 | JUNB(var. 2) |
| MA0491.2 | JUND |
| MA0492.1 | JUND(var. 2) |
| MA1027.1 | KAN1 |
| MA1383.1 | KAN2 |
| MA1028.1 | KAN4 |
| MA0493.1 | KIf1 |
| MA1511.1 | KLF10 |
| MA1512.1 | KLF11 |
| MA0742.1 | Klf12 |
| MA0657.1 | KLF13 |
| MA0740.1 | KLF14 |
| MA1513.1 | KLF15 |
| MA0741.1 | KLF16 |
| MA1514.1 | KLF17 |
| MA1515.1 | KLF2 |
| MA1516.1 | KLF3 |
| MA0039.4 | KLF4 |
| MA0599.1 | KLF5 |
| MA1517.1 | KLF6 |
| MA1107.2 | KLF9 |
| MA0451.1 | kni |
| MA0452.2 | Kr |
| MA1398.2 | KUA1 |
| MA0230.1 | lab |
| MA1673.1 | LBD18 |
| MA0231.1 | Ibe |
| MA0232.1 | Ibl |
| MA0618.1 | LBX1 |
| MA0699.1 | LBX2 |
| MA1187.1 | LCL1 |
| MA0581.1 | LEC2 |
| MA0768.1 | LEF1 |
| MA1246.1 | LEP |
| MA0324.1 | LEU3 |
| MA0590.1 | LFY |
| MA1518.1 | LHX1 |
| MA0700.2 | LHX2 |
| MA0135.1 | Lhx3 |
| MA0704.1 | Lhx4 |
| MA1519.1 | LHX5 |
| MA0658.1 | LHX6 |
| MA0705.1 | Lhx8 |
| MA0701.2 | LHX9 |
| MA1185.1 | LHY1 |
| MA0923.1 | lim-4 |
| MA1441.1 | lim-7 |
| MA0194.1 | Lim1 |
| MA0195.1 | Lim3 |
| MA0261.1 | lin-14 |
| MA1450.1 | lin-54 |
| MA0619.1 | LIN54 |
| MA0175.1 | Ims |
| MA0702.2 | LMX1A |
| MA0703.2 | LMX1B |
| MA0325.1 | LYS14 |
| MA1459.1 | M1BP |
| MA0262.1 | mab-3 |
| MA1442.1 | mab-5 |
| MA0326.1 | MAC1 |
| MA0118.1 | Macho-1 |
| MA0535.1 | Mad |
| MA1520.1 | MAF |
| MA0501.1 | MAF::NFE2 |
| MA1521.1 | MAFA |
| MA0117.2 | Mafb |
| MA0495.3 | MAFF |
| MA0659.2 | MAFG |
| MA0496.3 | MAFK |
| MA0328.2 | MATALPHA2 |
| MA0058.3 | MAX |
| MA0059.1 | MAX::MYC |
| MA1522.1 | MAZ |
| MA0329.1 | MBP1 |
| MA0330.1 | MBP1::SWI6 |
| MA0331.1 | MCM1 |
| MA0029.1 | Mecom |
| MA0052.4 | MEF2A |
| MA0660.1 | MEF2B |
| MA0497.1 | MEF2C |
| MA0773.1 | MEF2D |
| MA0498.2 | MEIS1 |
| MA1639.1 | MEIS1(var. 2) |
| MA0774.1 | MEIS2 |
| MA1640.1 | MEIS2(var. 2) |
| MA0775.1 | MEIS3 |
| MA0661.1 | MEOX1 |
| MA0706.1 | MEOX2 |
| MA0332.1 | MET28 |
| MA0333.1 | MET31 |
| MA0334.1 | MET32 |
| MA0335.1 | MET4 |
| MA0801.1 | MGA |
| MA0336.1 | MGA1 |
| MA1158.1 | MGP |
| MA0337.1 | MIG1 |
| MA0338.1 | MIG2 |
| MA0339.1 | MIG3 |
| MA0233.1 | mirr |
| MA0620.3 | MITF |
| MA0621.1 | mix-a |
| MA0662.1 | MIXL1 |
| MA0663.1 | MLX |
| MA0622.1 | MIxip |
| MA0664.1 | MLXIPL |
| MA0053.1 | MNB1A |
| MA0825.1 | MNT |
| MA0707.1 | MNX1 |
| MA0379.1 | MOT2 |
| MA0340.1 | MOT3 |
| MA1523.1 | MSANTD3 |
| MA0665.1 | MSC |
| MA1524.1 | MSGN1 |
| MA1433.1 | msn-1 |
| MA0341.1 | MSN2 |
| MA0342.1 | MSN4 |
| MA0666.1 | MSX1 |
| MA0708.1 | MSX2 |
| MA0709.1 | Msx3 |
| MA0863.1 | MTF1 |
| MA1108.2 | MXI1 |
| MA0100.3 | MYB |
| MA0054.1 | myb.Ph3 |
| MA1179.1 | MYB1 |
| MA1173.1 | MYB101 |
| MA1169.1 | MYB105 |
| MA1036.1 | MYB111 |
| MA1181.1 | MYB113 |
| MA1170.1 | MYB118 |
| MA1176.1 | MYB119 |
| MA1426.1 | MYB124 |
| MA0574.1 | MYB15 |
| MA1037.1 | MYB24 |
| MA1292.1 | MYB27 |
| MA1038.1 | MYB3 |
| MA1391.2 | MYB33 |
| MA1178.1 | MYB3R1 |
| MA1180.1 | MYB3R4 |
| MA1172.1 | MYB3R5 |
| MA1039.1 | MYB4 |
| MA1040.1 | MYB46 |
| MA1171.1 | MYB52 |
| MA1041.1 | MYB55 |
| MA1174.1 | MYB56 |
| MA1293.1 | MYB57 |
| MA1042.1 | MYB59 |
| MA1294.1 | MYB62 |
| MA1177.1 | MYB65 |
| MA1393.2 | MYB70 |
| MA1394.2 | MYB73 |
| MA1395.1 | MYB77 |
| MA1175.1 | MYB81 |
| MA1392.1 | MYB98 |
| MA0776.1 | MYBL1 |
| MA0777.1 | MYBL2 |
| MA0147.3 | MYC |
| MA0566.1 | MYC2 |
| MA0568.1 | MYC3 |
| MA0569.1 | MYC4 |
| MA0104.4 | MYCN |
| MA1641.1 | MYF5 |
| MA0667.1 | MYF6 |
| MA0499.2 | MYOD1 |
| MA0500.2 | MYOG |
| MA1168.1 | MYR2 |
| MA0056.2 | MZF1 |
| MA0057.1 | MZF1(var. 2) |
| MA1674.1 | NAC017 |
| MA0935.1 | NAC025 |
| MA1427.1 | NAC028 |
| MA1675.1 | NAC029 |
| MA1045.1 | NAC043 |
| MA0937.1 | NAC055 |
| MA0938.1 | NAC058 |
| MA1676.1 | NAC062 |
| MA1677.1 | NAC078 |
| MA0939.1 | NAC080 |
| MA1043.1 | NAC083 |
| MA1044.1 | NAC92 |
| MA0929.1 | NCU00019 |
| MA1434.1 | NCU02182 |
| MA0343.1 | NDT80 |
| MA1109.1 | NEUROD1 |
| MA0668.1 | NEUROD2 |
| MA0623.2 | NEUROG1 |
| MA0669.1 | NEUROG2 |
| MA1642.1 | NEUROG2(var. 2) |
| MA0606.1 | NFAT5 |
| MA0624.1 | NFATC1 |
| MA0152.1 | NFATC2 |
| MA0625.1 | NFATC3 |
| MA1525.1 | NFATC4 |
| MA0841.1 | NFE2 |
| MA0089.2 | NFE2L1 |
| MA0150.2 | Nfe2l2 |
| MA0670.1 | NFIA |
| MA1643.1 | NFIB |
| MA0161.2 | NFIC |
| MA0119.1 | NFIC::TLX1 |
| MA1527.1 | NFIC(var. 2) |
| MA0025.2 | NFIL3 |
| MA0671.1 | NFIX |
| MA1528.1 | NFIX(var. 2) |
| MA0105.4 | NFKB1 |
| MA0778.1 | NFKB2 |
| MA0060.3 | NFYA |
| MA0502.2 | NFYB |
| MA1644.1 | NFYC |
| MA0048.2 | NHLH1 |
| MA1529.1 | NHLH2 |
| MA0344.1 | NHP10 |
| MA0345.1 | NHP6A |
| MA0346.1 | NHP6B |
| MA1451.1 | nhr-6 |
| MA1435.1 | nit-4 |
| MA0196.1 | NK7.1 |
| MA1645.1 | NKX2-2 |
| MA0672.1 | NKX2-3 |
| MA0063.2 | NKX2-5 |
| MA0503.1 | Nkx2-5(var. 2) |
| MA0673.1 | NKX2-8 |
| MA0124.2 | Nkx3-1 |
| MA0122.3 | Nkx3-2 |
| MA0674.1 | NKX6-1 |
| MA0675.1 | NKX6-2 |
| MA1530.1 | NKX6-3 |
| MA0125.1 | Nobox |
| MA0710.1 | NOTO |
| MA0626.1 | Npas2 |
| MA1531.1 | NR1D1 |
| MA1532.1 | NR1D2 |
| MA0115.1 | NR1H2::RXRA |
| MA0494.1 | Nr1h3::Rxra |
| MA1110.1 | NR1H4 |
| MA1146.1 | NR1H4::RXRA |
| MA1533.1 | NR1I2 |
| MA1534.1 | NR1I3 |
| MA1535.1 | NR2C1 |
| MA0504.1 | NR2C2 |
| MA1536.1 | NR2C2(var. 2) |
| MA0676.1 | Nr2e1 |
| MA0164.1 | Nr2e3 |
| MA0017.2 | NR2F1 |
| MA1537.1 | NR2F1(var. 2) |
| MA1538.1 | NR2F1(var. 3) |
| MA1111.1 | NR2F2 |
| MA0677.1 | Nr2f6 |
| MA0728.1 | Nr2f6(var. 2) |
| MA1539.1 | NR2F6(var. 3) |
| MA0113.3 | NR3C1 |
| MA0727.1 | NR3C2 |
| MA1112.2 | NR4A1 |
| MA0160.1 | NR4A2 |
| MA1147.1 | NR4A2::RXRA |
| MA1540.1 | NR5A1 |
| MA0505.1 | Nr5a2 |
| MA1541.1 | NR6A1 |
| MA0506.1 | NRF1 |
| MA0347.1 | NRG1 |
| MA0842.2 | NRL |
| MA0421.1 | NSI1 |
| MA1678.1 | NTL8 |
| MA1046.1 | NTL9 |
| MA0197.2 | nub |
| MA1157.1 | NUC |
| MA1436.1 | nuc-1 |
| MA1417.1 | O2 |
| MA0348.1 | OAF1 |
| MA1278.1 | OBP1 |
| MA1274.1 | OBP3 |
| MA1280.1 | OBP4 |
| MA0234.1 | oc |
| MA0454.1 | odd |
| MA0198.1 | OdsH |
| MA1033.1 | OJ1058_F05.8 |
| MA1031.1 | OJ1581_H09.2 |
| MA0826.1 | OLIG1 |
| MA0678.1 | OLIG2 |
| MA0827.1 | OLIG3 |
| MA0235.1 | onecut |
| MA0679.2 | ONECUT1 |
| MA0756.1 | ONECUT2 |
| MA0757.1 | ONECUT3 |
| MA0456.1 | opa |
| MA0349.1 | OPI1 |
| MA0199.1 | Optix |
| MA1034.1 | 0s05g0497200 |
| MA1050.1 | Osl_08196 |
| MA1542.1 | OSR1 |
| MA1646.1 | OSR2 |
| MA1409.1 | OsRR22 |
| MA0236.1 | otp |
| MA0711.1 | OTX1 |
| MA0712.2 | OTX2 |
| MA0126.1 | ovo |
| MA1544.1 | OVOL1 |
| MA1545.1 | OVOL2 |
| MA1030.1 | P0510F09.23 |
| MA0924.1 | pal-1 |
| MA0237.2 | pan |
| MA0779.1 | PAX1 |
| MA0067.1 | Pax2 |
| MA0780.1 | PAX3 |
| MA1546.1 | PAX3(var. 2) |
| MA0068.2 | PAX4 |
| MA0014.3 | PAX5 |
| MA0069.1 | PAX6 |
| MA0680.1 | PAX7 |
| MA0781.1 | PAX9 |
| MA0238.1 | pb |
| MA0064.1 | PBF |
| MA0070.1 | PBX1 |
| MA1113.2 | PBX2 |
| MA1114.1 | PBX3 |
| MA1702.1 | Pdp1 |
| MA0352.1 | PDR1 |
| MA0353.1 | PDR3 |
| MA0354.1 | PDR8 |
| MA0132.2 | PDX1 |
| MA0127.1 | PEND |
| MA0546.1 | pha-4 |
| MA0355.1 | PHD1 |
| MA0457.1 | PHDP |
| MA1389.1 | PHL1 |
| MA1163.1 | PHL11 |
| MA1166.1 | PHL12 |
| MA1384.1 | PHL7 |
| MA1460.1 | pho |
| MA0356.1 | PHO2 |
| MA0357.1 | PHO4 |
| MA0713.1 | PHOX2A |
| MA0681.2 | PHOX2B |
| MA0987.1 | PHYPADRAFT_140773 |
| MA0988.1 | PHYPADRAFT_143875 |
| MA0989.1 | PHYPADRAFT_153324 |
| MA1007.1 | PHYPADRAFT_173530 |
| MA1008.1 | PHYPADRAFT_182268 |
| MA1023.1 | PHYPADRAFT_28324 |
| MA1022.1 | PHYPADRAFT_38837 |
| MA1021.1 | PHYPADRAFT_48267 |
| MA1010.1 | PHYPADRAFT_64121 |
| MA1011.1 | PHYPADRAFT_72483 |
| MA0559.1 | PI |
| MA0552.1 | PIF1 |
| MA0560.1 | PIF3 |
| MA0561.1 | PIF4 |
| MA0562.1 | PIF5 |
| MA1364.1 | PIF7 |
| MA0682.2 | PITX1 |
| MA1547.1 | PITX2 |
| MA0714.1 | PITX3 |
| MA0782.2 | PKNOX1 |
| MA0783.1 | PKNOX2 |
| MA0163.1 | PLAG1 |
| MA1615.1 | Plagl1 |
| MA1548.1 | PLAGL2 |
| MA1377.1 | PLT1 |
| MA1378.1 | PLT3 |
| MA0536.1 | pnr |
| MA0955.1 | PQPTR_0002s00440g |
| MA0784.1 | POU1F1 |
| MA0785.1 | POU2F1 |
| MA0507.1 | POU2F2 |
| MA0627.2 | POU2F3 |
| MA0786.1 | POU3F1 |
| MA0787.1 | POU3F2 |
| MA0788.1 | POU3F3 |
| MA0789.1 | POU3F4 |
| MA0790.1 | POU4F1 |
| MA0683.1 | POU4F2 |
| MA0791.1 | POU4F3 |
| MA1115.1 | POU5F1 |
| MA0142.1 | Pou5f1::Sox2 |
| MA0792.1 | POU5F1B |
| MA0628.1 | POU6F1 |
| MA1549.1 | POU6F1(var. 2) |
| MA0793.1 | POU6F2 |
| MA1148.1 | PPARA::RXRA |
| MA1550.1 | PPARD |
| MA0066.1 | PPARG |
| MA0065.2 | Pparg::Rxra |
| MA0200.1 | Pph13 |
| MA1703.1 | pqm-1 |
| MA0239.1 | prd |
| MA0508.3 | PRDM1 |
| MA1616.1 | Prdm15 |
| MA1647.1 | PRDM4 |
| MA0715.1 | PROP1 |
| MA0794.1 | PROX1 |
| MA0716.1 | PRRX1 |
| MA0075.3 | PRRX2 |
| MA1282.1 | PTF1 |
| MA1618.1 | Ptf1a |
| MA1619.1 | Ptf1a(var. 2) |
| MA1620.1 | Ptf1a(var. 3) |
| MA0201.1 | Ptx1 |
| MA1252.1 | PUCHI |
| MA0358.1 | PUT3 |
| MA1416.1 | RAMOSA1 |
| MA0359.1 | RAP1 |
| MA1679.1 | RAP2-1 |
| MA0980.2 | RAP2-10 |
| MA1051.1 | RAP2-3 |
| MA1052.1 | RAP2-6 |
| MA1216.1 | RAP21 |
| MA1249.1 | RAP210 |
| MA1266.1 | RAP211 |
| MA1256.1 | RAP212 |
| MA1221.1 | RAP26 |
| MA0729.1 | RARA |
| MA0159.1 | RARA::RXRA |
| MA1149.1 | RARA::RXRG |
| MA0730.1 | RARA(var. 2) |
| MA0857.1 | Rarb |
| MA0858.1 | Rarb(var. 2) |
| MA1552.1 | RARB(var. 3) |
| MA0859.1 | Rarg |
| MA0860.1 | Rarg(var. 2) |
| MA1553.1 | RARG(var. 3) |
| MA0582.1 | RAV1 |
| MA0583.1 | RAV1(var. 2) |
| MA0718.1 | RAX |
| MA0717.1 | RAX2 |
| MA0576.1 | RAX3 |
| MA1116.1 | RBPJ |
| MA1621.1 | Rbpj1 |
| MA0360.1 | RDR1 |
| MA0361.1 | RDS1 |
| MA0362.1 | RDS2 |
| MA0363.1 | REB1 |
| MA1415.1 | REF6 |
| MA0364.1 | REI1 |
| MA0101.1 | REL |
| MA0107.1 | RELA |
| MA1117.1 | RELB |
| MA0240.1 | repo |
| MA0138.2 | REST |
| MA0365.1 | RFX1 |
| MA0509.2 | RFX1 |
| MA0600.2 | RFX2 |
| MA0798.2 | RFX3 |
| MA0799.1 | RFX4 |
| MA0510.2 | RFX5 |
| MA1554.1 | RFX7 |
| MA0366.1 | RGM1 |
| MA0367.1 | RGT1 |
| MA0629.1 | Rhox11 |
| MA0719.1 | RHOXF1 |
| MA0368.1 | RIM101 |
| MA0369.1 | RLM1 |
| MA0370.1 | RME1 |
| MA0241.1 | ro |
| MA0071.1 | RORA |
| MA0072.1 | RORA(var. 2) |
| MA1150.1 | RORB |
| MA1151.1 | RORC |
| MA0371.1 | ROX1 |
| MA0372.1 | RPH1 |
| MA0373.1 | RPN4 |
| MA0073.1 | RREB1 |
| MA0374.1 | RSC3 |
| MA0375.1 | RSC30 |
| MA1431.1 | rst2 |
| MA0376.1 | RTG3 |
| MA0002.2 | RUNX1 |
| MA0511.2 | RUNX2 |
| MA0684.2 | RUNX3 |
| MA1184.1 | RVE1 |
| MA1190.1 | RVE5 |
| MA1183.1 | RVE6 |
| MA1680.1 | RVE7 |
| MA0202.1 | Rx |
| MA0512.2 | Rxra |
| MA0074.1 | RXRA::VDR |
| MA0855.1 | RXRB |
| MA1555.1 | RXRB(var. 2) |
| MA0856.1 | RXRG |
| MA1556.1 | RXRG(var. 2) |
| MA0193.1 | schlank |
| MA0203.1 | Scr |
| MA0743.2 | SCRT1 |
| MA0744.2 | SCRT2 |
| MA0243.1 | sd |
| MA0584.1 | 1-Sep |
| MA0563.1 | 3-Sep |
| MA0377.1 | SFL1 |
| MA0378.1 | SFP1 |
| MA1159.1 | SGR5 |
| MA0630.1 | SHOX |
| MA0720.1 | Shox2 |
| MA0380.1 | SIP4 |
| MA1118.1 | SIX1 |
| MA1119.1 | SIX2 |
| MA0631.1 | Six3 |
| MA0204.1 | Six4 |
| MA1405.1 | SIZF2 |
| MA0547.1 | skn-1 |
| MA0381.1 | SKN7 |
| MA0382.1 | SKO1 |
| MA0244.1 | slbo |
| MA0245.1 | slou |
| MA0458.1 | slp1 |
| MA0925.1 | sma-4 |
| MA1622.1 | Smad2::Smad3 |
| MA0513.1 | SMAD2::SMAD3::SMAD4 |
| MA0795.1 | SMAD3 |
| MA1153.1 | Smad4 |
| MA1557.1 | SMAD5 |
| MA0383.1 | SMP1 |
| MA0553.1 | SMZ |
| MA0086.2 | sna |
| MA1558.1 | SNAI1 |
| MA0745.2 | SNAI2 |
| MA1559.1 | SNAI3 |
| MA0544.1 | snpc-4 |
| MA0384.1 | SNT2 |
| MA0246.1 | so |
| MA0554.1 | SOC1 |
| MA1560.1 | SOHLH2 |
| MA0385.1 | SOK2 |
| MA1379.1 | SOL1 |
| MA0870.1 | Sox1 |
| MA0442.2 | SOX10 |
| MA0869.1 | Sox11 |
| MA1561.1 | SOX12 |
| MA1120.1 | SOX13 |
| MA1562.1 | SOX14 |
| MA1152.1 | SOX15 |
| MA0078.1 | Sox17 |
| MA1563.1 | SOX18 |
| MA0143.4 | SOX2 |
| MA0866.1 | SOX21 |
| MA0514.1 | Sox3 |
| MA0867.2 | SOX4 |
| MA0087.1 | Sox5 |
| MA0515.1 | Sox6 |
| MA0868.2 | SOX8 |
| MA0077.1 | SOX9 |
| MA0079.4 | SP1 |
| MA0516.2 | SP2 |
| MA0746.2 | SP3 |
| MA0685.1 | SP4 |
| MA0747.1 | SP8 |
| MA1564.1 | SP9 |
| MA0686.1 | SPDEF |
| MA0080.5 | SPI1 |
| MA0081.2 | SPIB |
| MA0687.1 | SPIC |
| MA1055.1 | SPL1 |
| MA1056.1 | SPL11 |
| MA1057.1 | SPL12 |
| MA1321.1 | SPL13 |
| MA0586.2 | SPL14 |
| MA1320.1 | SPL15 |
| MA0577.2 | SPL3 |
| MA1058.1 | SPL4 |
| MA1059.2 | SPL5 |
| MA1060.1 | SPL7 |
| MA0578.1 | SPL8 |
| MA1322.1 | SPL9 |
| MA1061.1 | SPT |
| MA0386.1 | SPT15 |
| MA0387.1 | SPT2 |
| MA0388.1 | SPT23 |
| MA0111.1 | Spz1 |
| MA0082.1 | squamosa |
| MA0389.1 | SRD1 |
| MA0595.1 | SREBF1 |
| MA0829.2 | SREBF1(var. 2) |
| MA0596.1 | SREBF2 |
| MA0828.1 | SREBF2(var. 2) |
| MA0083.3 | SRF |
| MA1681.1 | SRM1 |
| MA0084.1 | SRY |
| MA0137.3 | STAT1 |
| MA0517.1 | STAT1::STAT2 |
| MA1623.1 | Stat2 |
| MA0144.2 | STAT3 |
| MA0518.1 | Stat4 |
| MA1624.1 | Stat5a |
| MA0519.1 | Stat5a::Stat5b |
| MA1625.1 | Stat5b |
| MA0520.1 | Stat6 |
| MA0532.1 | Stat92E |
| MA0390.1 | STB3 |
| MA0391.1 | STB4 |
| MA0392.1 | STB5 |
| MA1410.1 | StBRC1 |
| MA0393.1 | STE12 |
| MA0394.1 | STP1 |
| MA0395.1 | STP2 |
| MA0396.1 | STP3 |
| MA0397.1 | STP4 |
| MA1372.1 | STZ |
| MA0085.1 | Su(H) |
| MA0533.1 | su(Hw) |
| MA0398.1 | SUM1 |
| MA0399.1 | SUT1 |
| MA0400.1 | SUT2 |
| MA1461.1 | SV |
| MA0555.1 | SVP |
| MA0401.1 | SWI4 |
| MA0402.1 | SWI5 |
| MA0936.1 | T11\|18.17 |
| MA0091.1 | TAL1::TCF3 |
| MA1430.1 | TB1 |
| MA0403.1 | TBF1 |
| MA0108.2 | TBP |
| MA1355.1 | TBP3 |
| MA0802.1 | TBR1 |
| MA0404.1 | TBS1 |
| MA0805.1 | TBX1 |
| MA0803.1 | TBX15 |
| MA1565.1 | TBX18 |
| MA0804.1 | TBX19 |
| MA0688.1 | TBX2 |
| MA0689.1 | TBX20 |
| MA0690.1 | TBX21 |
| MA1566.1 | TBX3 |
| MA0806.1 | TBX4 |
| MA0807.1 | TBX5 |
| MA1567.1 | TBX6 |
| MA0009.2 | TBXT |
| MA0521.1 | Tcf12 |
| MA1648.1 | TCF12(var. 2) |
| MA0832.1 | Tcf21 |
| MA1568.1 | TCF21(var. 2) |
| MA0522.3 | TCF3 |
| MA0830.2 | TCF4 |
| MA0769.2 | TCF7 |
| MA1421.1 | TCF7L1 |
| MA0523.1 | TCF7L2 |
| MA0632.2 | TCFL5 |
| MA1284.1 | TCP1 |
| MA1283.1 | TCP14 |
| MA1062.2 | TCP15 |
| MA0587.1 | TCP16 |
| MA1290.1 | TCP17 |
| MA1063.1 | TCP19 |
| MA1064.1 | TCP2 |
| MA1065.2 | TCP20 |
| MA1287.1 | TCP21 |
| MA1066.1 | TCP23 |
| MA1286.1 | TCP24 |
| MA1289.1 | TCP3 |
| MA1035.1 | TCP4 |
| MA1067.1 | TCP5 |
| MA1291.1 | TCP7 |
| MA1428.1 | TCP8 |
| MA1162.1 | TCX2 |
| MA1682.1 | TCX3 |
| MA0431.1 | TDA9 |
| MA0405.1 | TEA1 |
| MA0090.3 | TEAD1 |
| MA1121.1 | TEAD2 |
| MA0808.1 | TEAD3 |
| MA0809.2 | TEAD4 |
| MA0406.1 | TEC1 |
| MA0843.1 | TEF |
| MA0003.4 | TFAP2A |
| MA0810.1 | TFAP2A(var. 2) |
| MA0872.1 | TFAP2A(var. 3) |
| MA0811.1 | TFAP2B |
| MA0812.1 | TFAP2B(var. 2) |
| MA0813.1 | TFAP2B(var. 3) |
| MA0524.2 | TFAP2C |
| MA0814.2 | TFAP2C(var. 2) |
| MA0815.1 | TFAP2C(var. 3) |
| MA1569.1 | TFAP2E |
| MA0691.1 | TFAP4 |
| MA1570.1 | TFAP4(var. 2) |
| MA0145.3 | TFCP2 |
| MA1122.1 | TFDP1 |
| MA0831.2 | TFE3 |
| MA0692.1 | TFEB |
| MA0871.2 | TFEC |
| MA0588.1 | TGA1 |
| MA1346.1 | TGA10 |
| MA0129.1 | TGA1A |
| MA1068.1 | TGA2 |
| MA1336.1 | TGA3 |
| MA1335.1 | TGA4 |
| MA1047.2 | TGA5 |
| MA1069.1 | TGA6 |
| MA1070.1 | TGA7 |
| MA1348.1 | TGA9 |
| MA0796.1 | TGIF1 |
| MA0797.1 | TGIF2 |
| MA1571.1 | TGIF2LX |
| MA1572.1 | TGIF2LY |
| MA0597.1 | THAP1 |
| MA1573.1 | THAP11 |
| MA0407.1 | THI2 |
| MA1574.1 | THRB |
| MA1575.1 | THRB(var. 2) |
| MA1576.1 | THRB(var. 3) |
| MA0247.2 | tin |
| MA1220.1 | TINY |
| MA0459.1 | tll |
| MA1577.1 | TLX2 |
| MA0350.1 | TOD6 |
| MA0408.1 | TOS8 |
| MA0106.3 | TP53 |
| MA0525.2 | TP63 |
| MA0861.1 | TP73 |
| MA0205.2 | Trl |
| MA1352.1 | TRP1 |
| MA1356.1 | TRP2 |
| MA1411.1 | TSAR1 |
| MA1412.1 | TSAR2 |
| MA1161.1 | TSO1 |
| MA0460.1 | ttk |
| MA0248.1 | tup |
| MA0249.2 | twi |
| MA1123.2 | TWIST1 |
| MA0633.1 | Twist2 |
| MA0409.1 | TYE7 |
| MA0094.2 | Ubx |
| MA0410.1 | UGA3 |
| MA1413.1 | UIF1 |
| MA0412.1 | UME6 |
| MA1443.1 | unc-30 |
| MA0250.1 | unc-4 |
| MA0918.1 | unc-62 |
| MA0926.1 | unc-86 |
| MA0721.1 | UNCX |
| MA1074.1 | UNE10 |
| MA0251.1 | unpg |
| MA0411.1 | UPC2 |
| MA0422.1 | URC2 |
| MA0093.3 | USF1 |
| MA0526.3 | UMA0256.1 |
| MA0257.1 | zen2 |
| MA0928.1 | zfh-2 |
| MA1651.1 | ZFP42 |
| MA1583.1 | ZFP57 |
| MA0146.2 | Zfx |
| MA1329.2 | ZHD1 |
| MA1213.1 | ZHD3 |
| MA1326.1 | ZHD5 |
| MA1330.1 | ZHD6 |
| MA0696.1 | ZIC1 |
| MA1628.1 | Zic1::Zic2 |
| MA1629.1 | Zic2 |
| MA0697.1 | ZIC3 |
| MA0751.1 | ZIC4 |
| MA1584.1 | ZIC5 |
| MA1704.1 | zip-8 |
| MA1585.1 | ZKSCAN1 |
| MA1652.1 | ZKSCAN5 |
| MA0441.1 | ZMS1 |
| MA1587.1 | ZNF135 |
| MA1588.1 | ZNF136 |
| MA1589.1 | ZNF140 |
| MA0088.2 | ZNF143 |
| MA1653.1 | ZNF148 |
| MA1654.1 | ZNF16 |
| MA1124.1 | ZNF24 |
| MA0528.2 | ZNF263 |
| MA1592.1 | ZNF274 |
| MA1630.1 | Znf281 |
| MA1154.1 | ZNF282 |
| MA1593.1 | ZNF317 |
| MA1655.1 | ZNF341 |
| MA0130.1 | ZNF354C |
| MA1594.1 | ZNF382 |
| MA1125.1 | ZNF384 |
| MA0752.1 | ZNF410 |
| MA0116.1 | Znf423 |
| MA1656.1 | ZNF449 |
| MA1596.1 | ZNF460 |
| MA1597.1 | ZNF528 |
| MA1657.1 | ZNF652 |
| MA1599.1 | ZNF682 |
| 1MA1600.1 | ZNF684 |
| MA0753.2 | ZNF740 |
| MA1601.1 | ZNF75D |
| MA1602.1 | ZSCAN29 |
| MA1155.1 | ZSCAN4 |
| KY48 | |
| MA1317.1 | WRKY50 |
| MA1305.1 | WRKY55 |
| MA1089.1 | WRKY57 |
| MA1304.1 | WRKY59 |
| MA1300.1 | WRKY6 |
| MA1090.1 | WRKY60 |
| MA1091.1 | WRKY62 |
| MA1092.1 | WRKY63 |
| MA1302.1 | WRKY65 |
| MA1313.1 | WRKY7 |
| MA1308.1 | WRKY70 |
| MA1316.1 | WRKY71 |
| MA1093.1 | WRKY75 |
| MA1094.1 | WRKY8 |
| MA1627.1 | Wt1 |
| MA0414.1 | XBP1 |
| MA0844.1 | XBP1 |
| MA0415.1 | YAP1 |
| MA0416.1 | YAP3 |
| MA0417.1 | YAP5 |
| MA0418.1 | YAP6 |
| MA0419.1 | YAP7 |
| MA0423.1 | YER130C |
| MA0424.1 | YER184C |
| MA0425.1 | YGR067C |
| MA0426.1 | YHPI |
| MA0428.1 | YKL222C |
| MA0429.1 | YLL054C |
| MA0430.1 | YLR278C |
| MA0432.1 | YNR063W |
| MA0433.1 | YOX1 |
| MA0434.1 | YPR013C |
| MA0435.1 | YPR015C |
| MA0436.1 | YPR022C |
| MA0437.1 | YPR196W |
| MA0438.1 | YRM1 |
| MA0439.1 | YRR1 |
| MA0095.2 | YYl |
| MA0748.2 | YY2 |
| MA0255.1 | z |
| MA0440.1 | ZAP1 |
| MA0589.1 | ZAP1 |
| MA0749.1 | ZBED1 |
| MA1649.1 | ZBTB12 |
| MA1650.1 | ZBTB14 |
| MA0698.1 | ZBTB18 |
| MA1579.1 | ZBTB26 |
| MA1580.1 | ZBTB32 |
| MA0527.1 | ZBTB33 |
| MA1581.1 | ZBTB6 |
| MA0750.2 | ZBTB7A |
| MA0694.1 | ZBTB7B |
| MA0695.1 | ZBTB7C |
| MA0103.3 | ZEB1 |
| MA0927.1 | vab-7 |
| MA0722.1 | VAX1 |
| MA0723.1 | VAX2 |
| MA0693.2 | VDR |
| MA0724.1 | VENTX |
| MA1578.1 | VEZF1 |
| MA1462.1 | vfl |
| MA0252.1 | vis |
| MA0253.1 | vnd |
| MA0181.1 | Vsx1 |
| MA0725.1 | VSX1 |
| MA0180.1 | Vsx2 |
| MA0726.1 | VSX2 |
| MA0254.1 | vvl |
| MA1437.1 | wc-1 |
| MA1306.1 | WRKY11 |
| MA1075.1 | WRKY12 |
| MA1314.1 | WRKY14 |
| MA1076.2 | WRKY15 |
| MA1299.1 | WRKY17 |
| MA1077.1 | WRKY18 |
| MA1078.1 | WRKY2 |
| MA1295.1 | WRKY20 |
| MA1079.1 | WRKY21 |
| MA1303.1 | WRKY22 |
| MA1080.1 | WRKY23 |
| MA1315.1 | WRKY24 |
| MA1081.1 | WRKY25 |
| MA1297.1 | WRKY26 |
| MA1318.1 | WRKY27 |
| MA1311.2 | WRKY28 |
| MA1298.1 | WRKY29 |
| MA1309.1 | WRKY3 |
| MA1083.1 | WRKY30 |
| MA1307.1 | WRKY31 |
| MA1301.1 | WRKY33 |
| MA1084.1 | WRKY38 |
| MA1085.2 | WRKY40 |
| MA1310.1 | WRKY42 |
| MA1086.1 | WRKY43 |
| MA1087.1 | WRKY45 |
| MA1296.1 | WRKY46 |
| MA1312.1 | WRKY47 |
| MA1088.1 | WRKY48 |
| MA1317.1 | WRKY50 |
| MA1305.1 | WRKY55 |
| MA1089.1 | WRKY57 |
| MA1304.1 | WRKY59 |
| MA1300.1 | WRKY6 |
| MA1090.1 | WRKY60 |
| MA1091.1 | WRKY62 |
| MA1092.1 | WRKY63 |
| MA1302.1 | WRKY65 |
| MA1313.1 | WRKY7 |
| MA1308.1 | WRKY70 |
| MA1316.1 | WRKY71 |
| MA1093.1 | WRKY75 |
| MA1094.1 | WRKY8 |
| MA1627.1 | Wt1 |
| MA0414.1 | XBP1 |
| MA0844.1 | XBP1 |
| MA0415.1 | YAP1 |
| MA0416.1 | YAP3 |
| MA0417.1 | YAP5 |
| MA0418.1 | YAP6 |
| MA0419.1 | YAP7 |
| MA0423.1 | YER130C |
| MA0424.1 | YER184C |
| MA0425.1 | YGR067C |
| MA0426.1 | YHP1 |
| MA0428.1 | YKL222C |
| MA0429.1 | YLL054C |
| MA0430.1 | YLR278C |
| MA0432.1 | YNR063W |
| MA0433.1 | YOX1 |
| MA0434.1 | YPR013C |
| MA0435.1 | YPR015C |
| MA0436.1 | YPR022C |
| MA0437.1 | YPR196W |
| MA0438.1 | YRM1 |
| MA0439.1 | YRR1 |
| MA0095.2 | YYl |
| MA0748.2 | YY2 |
| MA0255.1 | z |
| MA0440.1 | ZAP1 |
| MA0589.1 | ZAP1 |
| MA0749.1 | ZBED1 |
| MA1649.1 | ZBTB12 |
| MA1650.1 | ZBTB14 |
| MA0698.1 | ZBTB18 |
| MA1579.1 | ZBTB26 |
| MA1580.1 | ZBTB32 |
| MA0527.1 | ZBTB33 |
| MA1581.1 | ZBTB6 |
| MA0750.2 | ZBTB7A |
| MA0694.1 | ZBTB7B |
| MA0695.1 | ZBTB7C |
| MA0103.3 | ZEB1 |
| MA0256.1 | zen |
| MA0257.1 | zen2 |
| MA0928.1 | zfh-2 |
| MA1651.1 | ZFP42 |
| MA1583.1 | ZFP57 |
| MA0146.2 | Zfx |
| MA1329.2 | ZHD1 |
| MA1213.1 | ZHD3 |
| MA1326.1 | ZHD5 |
| MA1330.1 | ZHD6 |
| MA0696.1 | ZIC1 |
| MA1628.1 | Zic1::Zic2 |
| MA1629.1 | Zic2 |
| MA0697.1 | ZIC3 |
| MA0751.1 | ZIC4 |
| MA1584.1 | ZIC5 |
| MA1704.1 | zip-8 |
| MA1585.1 | ZKSCAN1 |
| MA1652.1 | ZKSCAN5 |
| MA0441.1 | ZMS1 |
| MA1587.1 | ZNF135 |
| MA1588.1 | ZNF136 |
| MA1589.1 | ZNF140 |
| MA0088.2 | ZNF143 |
| MA1653.1 | ZNF148 |
| MA1654.1 | ZNF16 |
| MA1124.1 | ZNF24 |
| MA0528.2 | ZNF263 |
| MA1592.1 | ZNF274 |
| MA1630.1 | Znf281 |
| MA1154.1 | ZNF282 |
| MA1593.1 | ZNF317 |
| MA1655.1 | ZNF341 |
| MA0130.1 | ZNF354C |
| MA1594.1 | ZNF382 |
| MA1125.1 | ZNF384 |
| MA0752.1 | ZNF410 |
| MA0116.1 | Znf423 |
| MA1656.1 | ZNF449 |
| MA1596.1 | ZNF460 |
| MA1597.1 | ZNF528 |
| MA1657.1 | ZNF652 |
| MA1599.1 | ZNF682 |
| MA1600.1 | ZNF684 |
| MA0753.2 | ZNF740 |
| MA1601.1 | ZNF75D |
| MA1602.1 | ZSCAN29 |
| MA1155.1 | ZSCAN4 |

TABLE 3B
Examples of hormone responsive transcription factors and elements ²⁸

| Associating | | |
|---|---|---|
| Nuclear | | |
| Receptor | Ligand | Response Element |
| RORα,β,γ | retinoids | RORαRE |
| LXRα,β | oxysterols, including 22(R)- | LXRE |
| | hydroxycholesterol, 24(S)- | |
| | hydroxycholesterol, and 24(S),25- | |
| | epoxycholesterol | |
| FXR | Chenodeoxycholic acid and other | AGGTCA |
| | bile acids | |
| VDR | Vitamin D (1,25(OH)2D) | VDRE |
| | Lithocholic acid | |
| ERα,β | Estrogen | ERE-TATA, ERE |
| GR | cortisol and other glucocorticoids | decoy GRE, GRE, plfG |

[0196] The modification of endogenous transcription factor spacing by genetic editing is another viable strategy for gene activation. Transcription factor cooperativity^{30 31} is a well-known phenomenon where multiple transcription factors bound in proximity leads to greater overall binding stabilization and downstream regulatory effect. First, the analysis of endogenous transcription factor spacing for optimal regulatory potential can be determined based on primary DNA sequence in functional cis-regulatory elements or based on studies of transcription factor pair binding data in vitro (e.g., CAP-SELEX)¹⁶. Next, the mapping of endogenous transcription factor binding sites in cis-regulatory elements of a target gene of interest can be performed to determine sub-optimal endogenous transcription factor binding spacing³². The utilization of genetic modifiers that can introduce insertion or deletion edits (e.g., programmable nucleases, prime editors) can then be targeted to modify the endogenous transcription factor binding site distances to promote heritable target gene activation.

[0197] Selection of Target Genomic Regulatory Regions

[0198] The identification and selection of target genomic regulatory regions can be made based on identification or prediction (e.g., bioinformatic or empirical) of cis-regulatory elements (e.g., promoters, enhancers, insulators, silencers/repressors) that regulate a target gene or set of target genes of interest, untranslated regions (UTRs) of target gene transcripts that can modify transcript stability, or regions along the transcript that can modify translation initiation and/or elongation efficiency of the target gene transcript, or locations in the genome where expression of an non-coding RNA could lead to targeted gene repression.

[0199] In some embodiments, the target genomic regions are non-coding DNA sequences within 1 Mb or more of the target gene(s) of interest.

[0200] In some embodiments, the target genomic regions are promoters of the target gene(s) of interest, defined as proximal regions e.g., 1000 bp upstream and 500 bp downstream of the transcription start site (TSS).

[0201] In some embodiments, the target genomic regions are putative enhancer elements of the target gene(s) of interest defined by histone marks and/or chromatin accessibility features associated with functional enhancer elements (e.g., H3K4me1, H3K27ac)¹⁷.

[0202] In some embodiments, the target genomic regions are putative insulator elements of the target gene(s) of interest defined by histone marks and/or chromatin accessibility features associated with functional insulator elements^{17, 18}.

[0203] In some embodiments, the target genomic regions are putative silencer elements of the target gene(s) of interest defined by histone marks and/or chromatin accessibility features associated with functional silencer elements¹⁹.

[0204] In some embodiments, the target genomic regions are untranslated regions (UTRs) of target gene transcripts.

[0205] In some embodiments, the target genomic regions are intronic regions of target gene transcripts.

[0206] In some embodiments, the target genomic regions are coding sequences of target gene transcripts.

[0207] In some embodiments, the endogenous regulatory region of a gene (e.g., the promoter) is targeted to modify or enhance downstream transcription of translation machinery. This can be achieved e.g., by installing or modifying a TATA box (also known as Goldberg-Hogness box) in archae or eukaryotes or a Pribnow box in prokaryotes or by installing enhanced Kozak ((gcc)gccRccAUGG (SEQ ID NO: 478)) in eukaryotes, Shine-Dalgarno (AGGAGGU) in prokaryotes, start codon (AUG and CUG in mammalian cells, AUA and AUU in mitochondria, GUG and UUG in E. coli) or stop codon (UGA, UAG, UAA) sequences²⁰.

[0208] In some embodiments binding sites of non-coding RNAs (ncRNAs), such as microRNAs (miRNAs) or long non-coding RNAs (lncRNAs) are installed or modified to alter the binding of said ncRNAs to DNA or RNA with the result of altered gene expression, and/or RNA abundance, and/or protein expression.

[0209] Selection of Genetic Modifiers

[0210] The identification of genetic modifiers can be determined based on predictions (e.g., bioinformatic or empirical) of ability, efficiency and precision of a given modifier to introduce specific sequence motifs at a target region of interest (Table 1). The methods can include identifying genetic modifiers to introduce specific sequence motifs into target genomic regions with high predicted precision and efficiency to alter expression of a target gene or set of genes at the pre-transcriptional or post-transcriptional level, in the context of a cell type or set of cell types of interest.

[0211] In some embodiments, the methods can include using an algorithm that compares the target regulatory regions and regulatory motif sequences identified above and identifies candidate regulatory motif sequences. and compares the candidate regulatory motifs to the possible modifications that would be made by a set of genetic modifiers (e.g., to predict the modification(s) made by each of a set of genetic modifiers, to identify one or more genetic modifiers that can be used to modify the target regulatory region to introduce a functional regulatory motif. In some embodiments, the candidate regulatory motif sequences differ from the target gene regulatory region by less than a selected amount, e.g., by 1-50%, and a Base Editor or prime editor can be selected to make the changes. In some embodiments, there is no identity between the target regulatory regions and regulatory motif sequences, and a prime editor is selected for inserting a regulatory motif into the target regulatory region.

[0212] The identification of a genetic modifier (e.g., programmable nuclease, base editor, prime editor) can be performed through the unbiased saturating mutagenesis of regulatory regions (e.g., promoters, enhancers) associated with a target gene. Comprehensive genetic tiling of these regulatory elements and downstream readout of the editing effects on gene activation can be used to empirically identify combinations of genetic modifiers and target sites that yield varying levels of target gene activation. This strategy can be performed in a pooled library format where target gene activation is a selectable or sortable feature, allowing for the high-throughput identification of candidates for SHAPE.

[0213] In some embodiments, the sequence motif is introduced as a single motif or a repetitive sequence with multiple copies of the single motif that may or may not have linker sequences interspaced.

[0214] In some embodiments, the sequence motif is introduced as a combination of different sequence motifs with predicted additive or synergistic effects on target gene expression at the pre-transcriptional and/or post-transcriptional level, where the multiple sequence motifs may or may not have linker sequences interspaced.

[0215] In some embodiments, algorithms to predict sequence alleles following nuclease genome editing events are used to identify a programmable nuclease type (e.g., zinc finger nucleases, transcription activator-like effector nucleases, Cas9, CasX, Cas12) and target cleavage indice(s) within a DNA sequence of interest to produce an allele that resembles a sequence motif or modification of interest.

[0216] In some embodiments, algorithms focused on patterns of microhomology-mediated end joining (MMEJ) and/or non-homologous end joining (NHEJ) following nuclease-induced DBA double-strand breaks (DSBs) can be used for the prediction of alleles following genome editing by a programmable nuclease (e.g., zinc finger nucleases, transcription activator-like effector nucleases, Cas9, CasX, Cas12)²¹.

[0217] In some embodiments, the use of the predominant +1 insertion allele from Cas9 editing can be used to precisely install sequence motifs of interest²².

[0218] In some embodiments, algorithms to predict sequence alleles following base editing events can be used to identify the base editor type (e.g., ABEs, CBEs) and base editing window(s) within a DNA sequence of interest to produce an allele that resembles a sequence motif or modification of interest^{23,24 25}.

[0219] In some embodiments, algorithms to predict sequence alleles following base editing events can be used to identify the base editor type (e.g., ABEs, CBEs) and base editing window(s) within a DNA sequence of interest to produce an allele that modifies (e.g., strengthens, weakens) the regulatory potential of an existing sequence motif.

[0220] In some embodiments, algorithms to predict sequence alleles following prime editing events can be used to identify the prime editor type (e.g., SpCas9H840A-MMLV-RT), prime editing guide RNAs (pegRNAs), and nicking sgRNAs (ngRNAs) to install a specific sequence motif or modification that can affect the expression of the target gene at the pre-transcriptional or post-transcriptional level².

[0221] In some embodiments, prime editing can be used to install specific substitution edits within an endogenous sequence context to introduce specific sequence motifs of interest. In some embodiments, prime editing can be used to install specific insertion edits within an endogenous sequence context to introduce specific sequence motifs of interest.

[0222] In some embodiments, prime editing can be used to install specific insertion edits to modify endogenous sequence motifs within untranslated regions (UTRs) of target gene transcripts or insert sequences that contain RNA-stabilizing or de-stabilizing sequence motifs into untranslated regions (UTRs) of target gene transcripts to affect the abundance and/or expression of the target gene products (e.g., RNA, protein).

[0223] In some embodiments, prime editing can be used to install specific deletion edits within an endogenous sequence context to introduce specific sequence motifs of interest.

[0224] In some embodiments, prime editing can be used to install specific combination edits (e.g., substitution, insertion, and/or deletion edits) within an endogenous sequence context to introduce specific sequence motifs of interest

[0225] In some embodiments, the design of pegRNAs and ngRNAs for prime editing will introduce silent mutations into the protospacer adjacent motif (PAM).

[0226] In some embodiments, the design of ngRNAs for prime editing will preferentially target the genome following the editing event (known as PE3b).

[0227] In some embodiments, the introduction of a transcription factor (TF) binding site in promoter or enhancer sequences or any other DNA sequence that might affect transient or heritable gene activation can be induced using a base editor (BE). In this case an endogenous sequence would be altered by BEs to allow TF binding by increasing homology of the endogenous sequence to a known TF binding site, thereby enabling a SHAPE event (BE-SHAPE).

[0228] In some embodiments, the unbiased saturation mutagenesis across genomic sequences (e.g., promoter, enhancers, untranslated regions) can be performed to empirically determine the strategy for SHAPE.

[0229] In some embodiments, multiplex genetic editing can be utilized to induce more robust modification of target gene expression at the pre-transcriptional and/or post-transcriptional level.

[0230] In some embodiments, multiplex genetic editing can be utilized to modify multiple target gene expressions in parallel at the pre-transcriptional and/or post-transcriptional level.

[0231] In some embodiments, the installation of sequence motifs that act as response elements (Table 3C) can be used to perform inducible modification of gene expression (e.g., activation, repression)following the introduction of an exogenous small molecule, hormone, or drug.

[0232] In some embodiments, the installation of cell-type-specific sequence motifs can be used to achieve cell-type-specific modification of the expression of a target gene or set of target genes.

[0233] In some embodiments, the use of homology directed repair (HDR) through programmable nucleases and a donor DNA (e.g., ssODN, dsODN) can be used to introduce sequence motifs of interest into a target site²³.

[0234] In some embodiments, the use of NHEJ-mediated DNA sequence integration through programmable nucleases and double-stranded oligodeoxynucleotides (dsODN) or circular DNA donors (e.g., plasmids, minicircles) can be used to introduce sequence motifs of interest into a target site^{26 27}.

[0235] In some embodiments, a DNA sequence alteration described herein can be performed using CRISPR-guided DNA base editors such as the cytosine base editor (CBE) that allows for the introduction of C-to-T and G-to-A modifications, the adenine base editor (ABE) that allows for the introduction of A-to-G and T-to-C modifications, the cytosine-to-guanine transversion base editor (CGBE) that allows for the introduction of C-to-G and G-to-C modifications, as well as the synchronous programming of adenine and cytosine editor (SPACE) that allows for the simultaneous introduction of A-to-G (T-to-C on opposite strand) and C-to-T (G-to-A on opposite strand) modifications within the same editing window at the ssDNA bubble generated by RNA-guided fusion proteins.

[0236] While CBEs and CGBEs are comprised of a cytidine deaminase (e.g., pmCDA1, hAPOBEC3A, hAID, hAPOBEC3G or rAPOBEC1) as well as a CRISPR Cas RGN or a variant thereof, ABEs contain an adenosine deaminase (e.g., E. coli TadA or variants thereof as momoners or dimers) and a CRISPR Cas protein, and SPACE contains both adenine (e.g., E. coli TadA) and cytosine deaminases (e.g., pmCDA1) as well as CRISPR-Cas proteins (e.g., S. pyogenes Cas9).

[0237] In one aspect, the present invention relates to the use of an ABE or SPACE comprising: an adenosine deaminase, e.g., a wild type and/or engineered adenosine deaminase (e.g., ABEs 0.1, 0.2, 1.1, 1.2, 2.1, 2.2, 2.3, 2.4, 2.5, 2.6, 2.7, 2.8, 2.9, 2.10, 2.11, 2.12, 3.1, 3.2, 3.3, 3.4, 3.5, 3.6, 3.7, 3.8, 4.1, 4.2, 4.3, 5.1, 5.2, 5.3, 5.4, 5.5, 5.6, 5.7, 5.8, 5.9, 5.10, 5.11, 5.12, 5.13, 5.14, 6.1, 6.2, 6.3, 6.4, 6.5, 6.6, 7.1, 7.2, 7.3, 7.4, 7.5, 7.6, 7.7, 7.8, 7.9, 7.10, or ABEmax), E. coli TadA monomer, or variations of homo- or heterodimers thereof, bearing one or more mutations in either or both monomers (e.g., the TadA mutant used in miniABEmax-V82G, miniABEmax-K20A/R21A, miniABEmax-V106W, that decrease RNA editing activity while preserving DNA editing activity; a cytidine deaminase (e.g., pmCDA1, rat APOBEC1, human APOBEC3A, or human AID) or variations thereof with reduced RNA off-target editing, one or multiple uracil-n-clycosalyse inhibitors (UGIs); and a programmable DNA binding domain (e.g., Cas9-D10A); and optionally further comprising one or more nuclear localization sequences (e.g., SV40 large T antigen NLS (PKKKRRV, SEQ ID NO: 1), bipartite NLS (KRTADGSEFESPKKKRKV, SEQ ID NO. 2), or nucleoplasmin NLS (KRPAATKKAGQAKKKK, SEQ ID NO. 3). Other NLSs are known in the art; see, e.g., Cokol et al., EMBO Rep. 2000 Nov. 15; 1(5): 411-415; Freitas and Cunha, Curr Genomics. 2009 December; 10(8): 550-557.

[0238] In some embodiments, the dual-deaminase BE SPACE would be used and it would include a heterodimeric combined N-terminal adenosine and cytidine deaminase fusion (e.g., pmCDA1 or rAPOBEC1 or hA3A or AID fused to TadA monomers or dimers with a linker) or a heterodimeric combined C-terminal adenosine and cytidine deaminase fusion (e.g., pmCDA1 or rAPOBEC1 or hA3A or AID fused to TadA monomers or dimers with a linker). In both N- and C-terminal positions of these “hybrid fusion deaminase designs” the deaminases can be fused in either of these two orders: NH2-cytidine deaminase-linker-adenosine deaminase or NH2-adenosine deaminase-linker-cytidine deaminase.

[0239] In some embodiments, the programmable DNA binding domain is selected from the group consisting of engineered C2H2 zinc-fingers, transcription activator effector-like effectors (TALEs), and Clustered Regularly Interspaced Short Palindromic Repeats (CRISPR) Cas RNA-guided nucleases (RGNs) and variants thereof (e.g., Tables F L and MG).

[0240] In some embodiments, the CRISPR RGN is an ssDNA nickase or is catalytically inactive, e.g., a Cas9, CasX or Cas12a that has ssDNA nickase activity or is catalytically inactive.

[0241] In one aspect, the present invention relates to a base editing system comprising: (i) ABE, CBE, CGBE, or SPACE, wherein the programmable DNA binding domain is a CRISPR Cas RGN or a variant thereof; and (ii) at least one guide RNA compatible with the base editor that directs the base editor to a target sequence which is can then be deaminated in order to generate e.g., a TF binding site or any other modification that allows for the transcriptional activation of a targeted gene.

[0242] In one aspect, the present invention relates to an isolated nucleic acid encoding any of the CBEs, ABEs, CGBEs, and SPACE or other base editing systems described herein to induce a BE-SHAPE event.

[0243] In one aspect, the present invention relates to a vector comprising an isolated nucleic acid described herein.

[0244] In one aspect, the present invention relates to an isolated host cell, preferably a mammalian host cell, comprising any of the nucleic acids described herein.

[0245] In some embodiments, the isolated host cell described herein expresses a base editor and a gRNA for DNA modification to induce a BE-SHAPE event described herein.

[0246] In one aspect, the present invention relates to a method of deaminating a selected adenine and/or cytosine in a nucleic acid, the method comprising contacting the nucleic acid with SPACE, a base editing system, an isolated nucleic acid, a vector, or an isolated host cell described herein.

[0247] In one aspect, the present invention relates to a composition comprising a purified CBE, ABE, SPACE, or CGBE, a base editing system, an isolated nucleic acid, a vector, or an isolated host cell described herein.

[0248] In some embodiments, the composition includes one or more ribonucleoprotein (RNP) complexes.

[0249] In some embodiments, CBE, ABE, CGBE, or SPACE that are being used for BE-SHAPE comprise one or more uracil-N-glycosylase inhibitors (UGIs). In some embodiments, the base editors comprise a linker between the adenosine deaminase and the programmable DNA binding domain as well as the cytidine deaminase and the DNA binding domain, or both in the case of SPACE. In some embodiments the TadA domain can be monomeric, homodimeric or heterodimeric and contain all combinations of wild type (WT) E. coli TadA, or mutant variants of TadA.

[0250] In some embodiments one or two deaminase domains can be located at the C-terminus (e.g., pmCDA1) and N-terminus (TadA) or vice versa or they can both be located at the C- or N-terminus.

[0251] In some embodiments, the programmable DNA binding domain is selected from the group consisting of engineered C2H2 zinc-fingers, transcription activator effector-like effectors (TALEs), and Clustered Regularly Interspaced Short Palindromic Repeats (CRISPR)-Cas RNA-guided nucleases (RGNs) and variants thereof.

[0252] In some embodiments, the CRISPR-Cas RGN is an ssDNA nickase or is catalytically inactive, e.g., a Cas9 or Cas12a that is catalytically inactive or has ssDNA nickase activity (Table 4A).

[0253] In some embodiments, the methods include the use of base editing systems comprising (i) the adenine base editors described herein, wherein the programmable DNA binding domain is a CRISPR Cas RGN or a variant thereof (Table 4B); and (ii) at least one guide RNA compatible with the base editor that directs the base editor to a target sequence.

[0254] In some embodiments, the methods include the use of nucleic acids encoding ABE, CBE, CGBE or SPACE; vectors comprising the isolated nucleic acids; and isolated host cells, preferably mammalian host cells, comprising the nucleic acids. In some embodiments, the isolated host cell expresses an adenine base editor.

[0255] In some embodiments, the methods include the use of methods for deaminating a selected adenine in a nucleic acid, the method comprising contacting the nucleic acid with an adenine base editor or base editing system as described herein.

[0256] In some embodiments, the methods include the use of compositions comprising a purified ABE, CBE, CGBE or SPACE or base editing system as described herein. In some embodiments, the composition comprises one or more ribonucleoprotein (RNP) complexes.

[0257] In some embodiments, the guide RNAs that are used to target BEs for BE-SHAPE can be truncated by reducing spacer length to <20 nucleotides, e.g., to 17-18 nucleotides, which has been shown to enhance specificity of CRISPR-Cas nucleases (Fu & Sander et al, Nature Biotechnology 2014, 32(3):279-284) and may also affect base editing windows (Kim et al, Nature Biotechnology 2017, 35(4): 371-376).

[0258] In some embodiments, multiplex base editing with CBE, ABE, CGBE, and SPACE can be used to enhance the efficiency of BE-SHAPE. In this aspect, one or more gRNAs can be guiding one or more base editors (e.g., CBE and ABE, or ABE and CGBE, or SPACE and CGBE) to one or more genomic target sites to install multiple TF binding sites (or other sequence changes that drive transcriptional activation) at once in one cell or a population of cells, or a tissue, both in vivo or ex vivo.

[0259] In some embodiments, anti-CRISPR tools (Bondy-Denomy et al, Nature 2013, 493(7432):429-32 and Nature 2015, 526(7571):136-9; Pawluk et al, Cell 2016, 167(7):1829-1838.e9.) can be used to control the efficiency of CRISPR-based SHAPE platforms by altering the capacity of DNA binding and/or cleavage of the CRISPR-Cas protein when used as a nuclease or within a base or prime editor.

TABLE 4A
List of Exemplary Cas9 or Cas12a Orthologs

| | UniProt or GenBank | Nickase Mutations/Catalytic |
|---|---|---|
| Ortholog | Accession Number | residues |
| S. pyogenes Cas9 (SpCas9) | Q99ZW2.1 | D10A, E762A, H840A, N854A, |
| | | N863A, D986A¹⁷ |
| S. aureus Cas9 (SaCas9) | J7RUA5.1 | D10A and N580¹⁸ |
| S. thermophilus Cas9 | G3ECR1.2 | D31A and N891A¹⁹ |
| (St1Cas9) | | |
| S. pasteurianus Cas9 | BAK30384.1 | D10, H599* |
| (SpaCas9) | | |
| C. jejuni Cas9 (CjCas9) | Q0P897.1 | D8A, H559A²⁰ |
| F. novicida Cas9 (FnCas9) | A0Q5Y3.1 | D11, N995²¹ |
| P. lavamentivorans Cas9 | A7HP89.1 | D8, H601* |
| (PlCas9) | | |
| C. lari Cas9 (ClCas9) | G1UFN3.1 | D7, H567* |
| Pasteurella multocida Cas9 | Q9CLT2.1 | |
| F. novicida Cpf1 (FnCpf1) | A0Q7Q2.1 | D917, E1006, D1255²¹ |
| M. bovoculi Cpf1 (MbCpf1) | WP 052585281.1 | D986A** |
| A. sp. BV3L6 Cpf1 (AsCpf1) | U2UMQ6.1 | D908, 993E, Q1226, D1263²³ |
| L. bacterium N2006 (LbCpf1) | A0A182DWE3.1 | D832A²⁴ |

*predicted based on UniRule annotation on the UniProt database.
**Unpublished but deposited at addgene by Ervin Welker: pTE4565 (Addgene plasmid No 88903)

TABLE 4B
List of Exemplary High Fidelity and/or PAM-relaxed RGN Orthologs

| Published HF/PAM- | | |
|---|---|---|
| RGN variants | PMID | Mutations* |
| S. pyogenes Cas9 | 26628643 | K810A/K1003A/R1060A (1.0); |
| (SpCas9) eSpCas9 | | K848A/K1003A/R1060A(1.1) |
| S. pyogenes Cas9 | 29431739 | M495V/Y515N/K526E/R661Q; |
| (SpCas9) evoCas9 | | (M495V/Y515N/K526E/R661S; |
| | | M495V/Y515N/K526E/R661L) |
| S. pyogenes Cas9 | 26735016 | N497A/R661A/Q695A/Q926A |
| (SpCas9) HF1 | | |
| S. pyogenes Cas9 | 30082871 | R691A |
| (SpCas9) HiFi Cas9 | | |
| S. pyogenes Cas9 | 28931002 | N692A, M694A, Q695A, H698A |
| (SpCas9) HypaCas9 | | |
| S. pyogenes Cas9 | 30082838 | F539S, M763I, K890N |
| (SpCas9) Sniper- | | |
| Cas9 | | |
| S. pyogenes Cas9 | 29512652 | A262T, R324L, S409I, E480K, E543D, M694I, E1219V |
| (SpCas9) xCas9 | | |
| S. pyogenes Cas9 | 30166441 | R1335V, L1111R, D1135V, G1218R, |
| (SpCas9) SpCas9- | | E1219F, A1322R, T1337R |
| NG | | |
| S. pyogenes Cas9 | 26098369 | D1135V, R1335Q, T1337R; |
| (SpCas9) | | D1135V/G1218R/R1335E/T1337R |
| VQR/VRER | | |
| S. aureus Cas9 | 26524662 | E782K/N968K/R1015H |
| (SaCas9)-KKH | | |
| enAsCas12a | USSN | One or more of: E174R, S170R, S542R, K548R, |
| | 15/960,271 | K548V, N551R, N552R, K607R, K607H, e.g., |
| | | E174R/S542R/K548R, E174R/S542R/K607R, |
| | | E174R/S542R/K548V/N552R, S170R/S542R/K548R, |
| | | S170R/E174R, E174R/S542R, S170R/S542R, |
| | | E174R/S542R/K548R/N551R, E174R/S542R/K607H, |
| | | S170R/S542R/K607R, or |
| | | S170R/S542R/K548V/N552R |
| enAsCas12a-HF | USSN | One or more of: E174R, S542R, K548R, e.g., |
| | 15/960,271 | E174R/S542R/K548R, E174R/S542R/K607R, |
| | | E174R/S542R/K548V/N552R, S170R/S542R/K548R, |
| | | S170R/E174R, E174R/S542R, S170R/S542R, |
| | | E174R/S542R/K548R/N551R, E174R/S542R/K607H, |
| | | S170R/S542R/K607R, or |
| | | S170R/S542R/K548V/N552R, with the addition of one |
| | | or more of: N282A, T315A, N515A and K949A |
| enLbCas12a(HF) | USSN | One or more of T152R, T152K, D156R, D156K, |
| | 15/960,271 | Q529K, G532R, G532K, G532Q, K538R, K538V, |
| | | D541R, Y542R, M592A, K595R, K595H, K595S or |
| | | K595Q, e.g., D156R/G532R/K538R, |
| | | D156R/G532R/K595R, D156R/G532R/K538V/Y542R, |
| | | T152R/G532R/K538R, T152R/D156R, D156R/G532R, |
| | | T152R/G532R, D156R/G532R/K538R/D541R, |
| | | D156R/G532R/K595H, T152R/G532R/K595R, |
| | | T152R/G532R/K538V/Y542R, optionally with the |
| | | addition of one or more of: N260A, N256A, K514A, |
| | | D505A, K881A, S286A, K272A, K897A |
| enFnCas12a(HF) | USSN | One or more of T177A, K180R, K180K, E184R, |
| | 15/960,271 | E184K, T604K, N607R, N607K, N607Q, K613R, |
| | | K613V, D616R, N617R, M668A, K671R, K671H, |
| | | K671S, or K671Q, e.g., E184R/N607R/K613R, |
| | | E184R/N607R/K671R, E184R/N607R/K613V/N617R, |
| | | K180R/N607R/K613R, K180R/E184R, E184R/N607R, |
| | | K180R/N607R, E184R/N607R/K613R/D616R, |
| | | E184R/N607R/K671H, K180R/N607R/K671R, |
| | | K180R/N607R/K613V/N617R, optionally with the |
| | | addition of one or more of: N305A, N301A, K589A, |
| | | N580A, K962A, S334A, K320A, K978A |
| chimeric Cas9 | 30718489 | S. aureus Cas9 with PAM interaction domain from |
| cCas9 | | SaCas9 orthologues, expands recognition and |
| | | targetability of NNVRRN, NNVACT, NNVATG, |
| | | NNVATT, NNVGCT, NNVGTG, and NNVGTT PAM |
| | | sequences |
| Streptococcus | doi.org/10.1 | Recognizes 5’-NAA-3’ PAM |
| macacae (Smac) | 101/429654 | |
| Cas9 NCTC 11558 | | |
| Spy-mac Cas9, | doi.org/10.1 | Recognizes 5’-NAA-3’ PAM |
| Smac-py Cas9 | 101/429654 | |
| N. meningitidis | 30581144 | Recognizes N₄CC PAM |
| Nme2Cas9 | | |
| SpG Cas9 (SEQ-ID | 32217751 | SpCas9 variant capable of targeting NGN PAMs |
| 158) | | D1135L/S1136W/G1218K/E1219Q/R1335Q/T1337R |
| | | Also as SpG-HF1 in combination with |
| | | N497A/R661A/Q695A/Q926A |
| SpRY Cas9 (SEQ-ID | 32217751 | SpCas9 variant capable of targeting NRN>NYN PAMs |
| 157) | | SpRY(A61R/L1111R/D1135L/S1136W/G1218K/E121 |
| | | 9Q/N1317R/A1322R/R1333P/R1335Q/T1337R); also |
| | | as SpRY-HF1 in combination with |
| | | N497A/R661A/Q695A/Q926A |

*predicted based on UniRule annotation on the UniProt database.

[0260] SHAPE Applications

[0261] Examples of applications of the SHAPE strategy include SHAPE-TF (transcription factor), SHAPE-UTR (untranslated region), SHAPE-RNAi (RNA interference), and SHAPE-protein (e.g., Kozak sequence, codon optimization).

[0262] SHAPE-TF

[0263] In some instances, the SHAPE strategy can alter target gene expression at the pre-transcriptional level through the targeted introduction of transcription factor binding motifs (SHAPE-TF) into regions in the genome. Following the introduction of these transcription factor binding motifs (e.g., identified using a method described herein, or from a database such as the JASPAR database (e.g., 8th release—Fornes et al, “JASPAR 2020: update of the open-access database of transcription factor binding profiles”, Nucleic Acids Research Volume 48, Issue D1, 8 Jan. 2020, Pages D87—D92.), the recruitment of endogenous transcription factors to the target locus can enable the activation or repression of target gene expression through the increase or decrease in gene transcription, respectively. In addition to the introduction or modification of transcription factor binding sites, SHAPE-TF can also work through the modification of spacing between endogenous transcription factor binding sites to achieve alteration of target gene expression. To achieve SHAPE-TF, there are several steps that include 1) the identification/discovery of sequence motifs that can actively recruit transcription factors or modify endogenous transcription factor spacing, respectively, 2) the identification of target genomic sequence(s) to introduce the sequence motif or modification to affect target gene expression, and 3) identification of the genetic modifier to use to install the precise edit.

[0264] SHAPE-UTR

[0265] In some instances, the SHAPE strategy can alter target gene expression at the post-transcriptional level through the targeted introduction of sequence motifs into untranslated regions (SHAPE-UTR) of target gene transcripts to affect transcript stability and downstream protein expression. Following the introduction of these sequence motifs into UTRs, the stabilization or de-stabilization of target gene transcripts can enable the activation or repression of target gene expression through the increase or decrease in gene translation, respectively. To achieve SHAPE-UTR, there are several steps that include 1) the identification or discovery of sequence motifs that can modify a transcript stability when placed at the 5′ and/or 3′ UTRs, 2) the identification of specific regions within the 5′ and/or 3′ UTRs to introduce a sequence motif to affect transcript stability, and 3) identification of the genetic modifier to use to install the precise edit.

[0266] SHAPE-RNAi

[0267] In some instances, the SHAPE strategy can alter target gene expression at the post-transcriptional level through the targeted introduction of sequence motifs (e.g., microRNA binding sites on DNA/RNA, e.g., from the mirtarbase database (e.g., miRTarBase Release 8.0—Chou et al, “miRTarBase update 2018: A resource for experimentally validated microRNA-target interactions” Nucleic Acids Research 2018 Jan. 4; 46(D1):D296-D302)) that are targeted by endogenous non-coding RNAs (e.g., miRNAs, siRNAs, lncRNAs) to achieve RNA interference (SHAPE-RNAi). Following the introduction of these sequence motifs, endogenous non-coding RNAs may bind the introduced sequence and de-stabilize or inhibit translation of the target transcripts. To achieve SHAPE-RNAi, there are several steps that include 1) the identification or discovery of sequence motifs that can be targeted by endogenous non-coding RNA molecules, 2) the identification of specific regions in the target transcript that can promote RNA interference, and 3) identification of the genetic modifier to use to install the precise edit.

[0268] SHAPE-Protein

[0269] In some instances, the SHAPE strategy can alter target gene expression at the post-transcriptional level through sequence optimization for target gene transcripts (SHAPE-protein) to increase translation efficiency. The introduction of sequence motifs can be performed through the de novo introduction of new regulatory elements or optimization of endogenous regulatory elements that play a role in transcription or translation initiation and/or elongation. These sequence motifs can be related to elements such as the Kozak sequence or optimal codon structures for the coding regions of target gene transcripts. To achieve SHAPE-protein, there are several steps that include 1) the identification or discovery of sequence motifs that can modify translation initiation and/or elongation efficiency, 2) the identification of specific regions in genome to introduce a sequence motif for modification of translation initiation and/or elongation, and 3) identification of the genetic modifier to use to install the precise edit.

### Methods of Altering Expression of Disease-Related Target Genes

[0270] The present methods can include using SHAPE to alter expression of disease related target genes. Thus in some embodiments, the target gene is associated with a disease. Examples of haploinsufficiency diseases (Table 5; from Matharu N, Rattanasopha S, Tamura S, et al. Science. 2019; 363(6424)) and diseases caused by non-coding mutations (Table 6) are listed below. Rather than correcting a mutation that leads to haploinsufficiency, the present methods can be used to rescue haploinsufficiency with synthetic upregulation of a healthy allele—without reverting the “damaged” allele to WT sequence. Table 6 shows disease-related enhancer SNPs that cause other diseases based on down-regulated or upregulated expression. Again, rather than correcting the exact SNPs/genetic variants that cause disease, the present methods can be used to mitigate the effects of those SNPs.

TABLE 5
Examples of genes leading to haploinsufficiency
disease targetable by SHAPE

| Gene name | Gene ID PMID | Transcript ID |
|---|---|---|
| AAGAB | ENSG00000103591 | ENST00000261880 |
| ABCA4 | ENSG00000198691 | ENST00000370225 |
| ABCA7 | ENSG00000064687 | ENST00000263094 |
| ABCC6 | ENSG00000275331 | ENST00000620078 |
| ABCC9 | ENSG00000069431 | ENST00000261201 |
| ABCD1 | ENSG00000101986 | ENST00000218104 |
| ACSL4 | ENSG00000068366 | ENST00000340800 |
| ACTB | ENSG00000075624 | ENST00000331789 |
| ACTC1 | ENSG00000159251 | ENST00000290378 |
| ACTN2 | ENSG00000077522 | ENST00000366578 |
| ACVRL1 | ENSG00000139567 | ENST00000388922 |
| ADAR | ENSG00000160710 | ENST00000368474 |
| AFF2 | ENSG00000155966 | ENST00000370460 |
| AFG3L2 | ENSG00000141385 | ENST00000269143 |
| AGRP | ENSG00000159723 | ENST00000290953 |
| AHSP | ENSG00000169877 | ENST00000302312 |
| AKT3 | ENSG00000275199 | ENST00000613395 |
| ALDH1A2 | ENSG00000128918 | ENST00000249750 |
| ALX4 | ENSG00000052850 | ENST00000329255 |
| ANK2 | ENSG00000145362 | ENST00000503423 |
| ANKRD11 | ENSG00000167522 | ENST00000301030 |
| ANOS1 | ENSG00000011201 | ENST00000262648 |
| ANXA7 | ENSG00000138279 | ENST00000372921 |
| AP1S2 | ENSG00000182287 | ENST00000329235 |
| APC | ENSG00000134982 | ENST00000257430 |
| AR | ENSG00000169083 | ENST00000374690 |
| ARID2 | ENSG00000189079 | ENST00000334344 |
| ARSE | ENSG00000157399 | ENST00000381134 |
| ARX | ENSG00000004848 | ENST00000379044 |
| ASXL1 | ENSG00000171456 | ENST00000375687 |
| ASXL2 | ENSG00000143970 | ENST00000435504 |
| ATM | ENSG00000149311 | ENST00000278616 |
| ATP1A1 | ENSG00000163399 | ENST00000295598 |
| ATP1A2 | ENSG00000018625 | ENST00000361216 |
| ATP2A2 | ENSG00000174437 | ENST00000539276 |
| ATP2C1 | ENSG00000017260 | ENST00000359644 |
| ATP7A | ENSG00000165240 | ENST00000341514 |
| ATP8A2 | ENSG00000132932 | ENST00000381655 |
| ATR | ENSG00000175054 | ENST00000350721 |
| ATRX | ENSG00000085224 | ENST00000373344 |
| AUTS2 | ENSG00000158321 | ENST00000342771 |
| AVPR2 | ENSG00000126895 | ENST00000358927 |
| B4GALT7 | ENSG00000027847 | ENST00000029410 |
| BAG1 | ENSG00000107262 | ENST00000634734 |
| BAG3 | ENSG00000151929 | ENST00000369085 |
| BCL11A | ENSG00000119866 | ENST00000335712 |
| BCL11B | ENSG00000127152 | ENST00000357195 |
| BCO1 | ENSG00000135697 | ENST00000258168 |
| BCOR | ENSG00000183337 | ENST00000342274 |
| BECN1 | ENSG00000126581 | ENST00000361523 |
| BLM | ENSG00000197299 | ENST00000355112 |
| BMP4 | ENSG00000125378 | ENST00000559087 |
| BMPR1A | ENSG00000107779 | ENST00000372037 |
| BMPR2 | ENSG00000204217 | ENST00000374580 |
| BRAF | ENSG00000157764 | ENST00000288602 |
| BRCA1 | ENSG00000012048 | ENST00000471181 |
| BRCA2 | ENSG00000139618 | ENST00000380152 |
| BRWD3 | ENSG00000165288 | ENST00000373275 |
| BTK | ENSG00000010671 | ENST00000308731 |
| BUB1B | ENSG00000156970 | ENST00000287598 |
| BUB3 | ENSG00000154473 | ENST00000368865 |
| C3 | ENSG00000125730 | ENST00000245907 |
| CACNA1A | ENSG00000141837 | ENST00000360228 |
| CACNA1C | ENSG00000151067 | ENST00000347598 |
| CACNB2 | ENSG00000165995 | ENST00000324631 |
| CAMTA1 | ENSG00000171735 | ENST00000303635 |
| CASK | ENSG00000147044 | ENST00000378166 |
| CAV1 | ENSG00000105974 | ENST00000341049 |
| CAV3 | ENSG00000182533 | ENST00000343849 |
| CBFB | ENSG00000067955 | ENST00000290858 |
| CCNA2 | ENSG00000145386 | ENST00000618014 |
| CD2AP | ENSG00000198087 | ENST00000359314 |
| CDC73 | ENSG00000134371 | ENST00000367435 |
| CDH1 | ENSG00000039068 | ENST00000261769 |
| CDKL5 | ENSG00000008086 | ENST00000379989 |
| CDKN1B | ENSG00000111276 | ENST00000228872 |
| CDKN1C | ENSG00000273707 | ENST00000616138 |
| CDKN2A | ENSG00000147889 | ENST00000304494 |
| CDKN2B | ENSG00000147883 | ENST00000276925 |
| CDKN2C | ENSG00000123080 | ENST00000262662 |
| CEP152 | ENSG00000103995 | ENST00000399334 |
| CHD2 | ENSG00000173575 | ENST00000577670 |
| CHD5 | ENSG00000116254 | ENST00000262450 |
| CHD7 | ENSG00000171316 | ENST00000423902 |
| CHD8 | ENSG00000100888 | ENST00000430710 |
| CHL1 | ENSG00000134121 | ENST00000256509 |
| CHM | ENSG00000188419 | ENST00000357749 |
| CHRDL1 | ENSG00000101938 | ENST00000394797 |
| CHRM3 | ENSG00000133019 | ENST00000255380 |
| CHRNB2 | ENSG00000160716 | ENST00000368476 |
| CIC | ENSG00000079432 | ENST00000575354 |
| CLCN5 | ENSG00000171365 | ENST00000376108 |
| CNKSR2 | ENSG00000149970 | ENST00000425654 |
| CNTN4 | ENSG00000144619 | ENST00000418658 |
| CNTNAP2 | ENSG00000278728 | ENST00000613345 |
| COCH | ENSG00000100473 | ENST00000396618 |
| COL10A1 | ENSG00000123500 | ENST00000243222 |
| COL11A1 | ENSG00000060718 | ENST00000370096 |
| COL1A1 | ENSG00000108821 | ENST00000225964 |
| COL1A2 | ENSG00000164692 | ENST00000297268 |
| COL2A1 | ENSG00000139219 | ENST00000380518 |
| COL3A1 | ENSG00000168542 | ENST00000304636 |
| COL4A1 | ENSG00000187498 | ENST00000375820 |
| COL5A1 | ENSG00000130635 | ENST00000371817 |
| COL6A1 | ENSG00000142156 | ENST00000361866 |
| COMT | ENSG00000093010 | ENST00000585066 |
| COPS3 | ENSG00000141030 | ENST00000268717 |
| COPS5 | ENSG00000121022 | ENST00000357849 |
| CREBBP | ENSG00000005339 | ENST00000262367 |
| CRX | ENSG00000105392 | ENST00000221996 |
| CRYAB | ENSG00000109846 | ENST00000527950 |
| CRYBB2 | ENSG00000244752 | ENST00000398215 |
| CSF1R | ENSG00000182578 | ENST00000286301 |
| CSF2RA | ENSG00000198223 | ENST00000417535 |
| CSH1 | ENSG00000136488 | ENST00000316193 |
| CSRP3 | ENSG00000129170 | ENST00000533783 |
| CTCF | ENSG00000102974 | ENST00000264010 |
| CTLA4 | ENSG00000163599 | ENST00000302823 |
| CTNND2 | ENSG00000169862 | ENST00000304623 |
| CUL4B | ENSG00000158290 | ENST00000404115 |
| CYBB | ENSG00000165168 | ENST00000378588 |
| CYP11A1 | ENSG00000140459 | ENST00000268053 |
| DCC | ENSG00000187323 | ENST00000442544 |
| DCX | ENSG00000077279 | ENST00000356220 |
| DDX3X | ENSG00000215301 | ENST00000629496 |
| DEAF1 | ENSG00000282712 | ENST00000634194 |
| DEPDC5 | ENSG00000100150 | ENST00000382112 |
| DFFB | ENSG00000169598 | ENST00000378209 |
| DFNA5 | ENSG00000105928 | ENST00000342947 |
| DGCR2 | ENSG00000070413 | ENST00000263196 |
| DICER1 | ENSG00000100697 | ENST00000526495 |
| DIRC2 | ENSG00000138463 | ENST00000261038 |
| DKC1 | ENSG00000130826 | ENST00000626756 |
| DLG3 | ENSG00000082458 | ENST00000374360 |
| DLL4 | ENSG00000128917 | ENST00000249749 |
| DMD | ENSG00000198947 | ENST00000357033 |
| DMPK | ENSG00000104936 | ENST00000291270 |
| DMRT1 | ENSG00000137090 | ENST00000382276 |
| DMRT2 | ENSG00000173253 | ENST00000382251 |
| DSC2 | ENSG00000134755 | ENST00000280904 |
| DSG1 | ENSG00000134760 | ENST00000257192 |
| DSG2 | ENSG00000046604 | ENST00000261590 |
| DSP | ENSG00000096696 | ENST00000379802 |
| DYRK1A | ENSG00000157540 | ENST00000398960 |
| EBF3 | ENSG00000108001 | ENST00000368648 |
| EBP | ENSG00000147155 | ENST00000495186 |
| EDA | ENSG00000158813 | ENST00000374553 |
| EDN3 | ENSG00000124205 | ENST00000337938 |
| EDNRB | ENSG00000136160 | ENST00000334286 |
| EEF1E1 | ENSG00000124802 | ENST00000379715 |
| EFNB1 | ENSG00000090776 | ENST00000204961 |
| EFTUD2 | ENSG00000108883 | ENST00000426333 |
| EGR1 | ENSG00000120738 | ENST00000239938 |
| EHHADH | ENSG00000113790 | ENST00000231887 |
| EHMT1 | ENSG00000181090 | ENST00000629335 |
| ELAVL4 | ENSG00000162374 | ENST00000371819 |
| ELN | ENSG00000049540 | ENST00000252034 |
| ELOVL4 | ENSG00000118402 | ENST00000369816 |
| EMX2 | ENSG00000170370 | ENST00000553456 |
| ENAM | ENSG00000132464 | ENST00000396073 |
| ENG | ENSG00000106991 | ENST00000344849 |
| EP300 | ENSG00000100393 | ENST00000408233 |
| ERF | ENSG00000105722 | ENST00000222329 |
| ERMARD | ENSG00000276187 | ENST00000621205 |
| ETV6 | ENSG00000139083 | ENST00000396373 |
| EXT1 | ENSG00000182197 | ENST00000378204 |
| EXT2 | ENSG00000151348 | ENST00000533608 |
| EYA1 | ENSG00000104313 | ENST00000340726 |
| EYA4 | ENSG00000112319 | ENST00000531901 |
| F8 | ENSG00000185010 | ENST00000360256 |
| F9 | ENSG00000101981 | ENST00000218099 |
| FAM58A | ENSG00000262919 | ENST00000440428 |
| FANCB | ENSG00000181544 | ENST00000324138 |
| FAS | ENSG00000026103 | ENST00000355740 |
| FBLN1 | ENSG00000077942 | ENST00000327858 |
| FBN1 | ENSG00000166147 | ENST00000316623 |
| FBN2 | ENSG00000138829 | ENST00000508053 |
| FBXO38 | ENSG00000145868 | ENST00000340253 |
| FBXW7 | ENSG00000109670 | ENST00000281708 |
| FECH | ENSG00000066926 | ENST00000262093 |
| FEN1 | ENSG00000168496 | ENST00000305885 |
| FGD1 | ENSG00000102302 | ENST00000375135 |
| FGF10 | ENSG00000070193 | ENST00000264664 |
| FGF3 | ENSG00000186895 | ENST00000334134 |
| FGF8 | ENSG00000107831 | ENST00000320185 |
| FGFR1 | ENSG00000077782 | ENST00000447712 |
| FGFR3 | ENSG00000068078 | ENST00000440486 |
| FIGLA | ENSG00000183733 | ENST00000332372 |
| FKBP6 | ENSG00000077800 | ENST00000252037 |
| FLCN | ENSG00000154803 | ENST00000285071 |
| FLG | ENSG00000143631 | ENST00000368799 |
| FLI1 | ENSG00000151702 | ENST00000527786 |
| FLNA | ENSG00000196924 | ENST00000422373 |
| FOXC1 | ENSG00000054598 | ENST00000380874 |
| FOXC2 | ENSG00000176692 | ENST00000320354 |
| FOXE3 | ENSG00000186790 | ENST00000335071 |
| FOXF1 | ENSG00000103241 | ENST00000262426 |
| FOXG1 | ENSG00000176165 | ENST00000313071 |
| FOXL2 | ENSG00000183770 | ENST00000330315 |
| FOXO1 | ENSG00000150907 | ENST00000379561 |
| FOXP1 | ENSG00000114861 | ENST00000318789 |
| FOXP2 | ENSG00000128573 | ENST00000393491 |
| FRMD7 | ENSG00000165694 | ENST00000298542 |
| FSCN2 | ENSG00000186765 | ENST00000417245 |
| FSHR | ENSG00000170820 | ENST00000406846 |
| FTL | ENSG00000087086 | ENST00000331825 |
| FTSJ1 | ENSG00000068438 | ENST00000348411 |
| FUS | ENSG00000089280 | ENST00000254108 |
| FZD4 | ENSG00000174804 | ENST00000531380 |
| GALR1 | ENSG00000166573 | ENST00000299727 |
| GATA2 | ENSG00000179348 | ENST00000341105 |
| GATA3 | ENSG00000107485 | ENST00000346208 |
| GATA4 | ENSG00000136574 | ENST00000335135 |
| GATA6 | ENSG00000141448 | ENST00000269216 |
| GCH1 | ENSG00000131979 | ENST00000491895 |
| GCK | ENSG00000106633 | ENST00000403799 |
| GCKR | ENSG00000084734 | ENST00000264717 |
| GCNT1 | ENSG00000187210 | ENST00000442371 |
| GDF5 | ENSG00000125965 | ENST00000374372 |
| GDI1 | ENSG00000203879 | ENST00000447750 |
| GDNF | ENSG00000168621 | ENST00000515058 |
| GHRL | ENSG00000157017 | ENST00000335542 |
| GJA5 | ENSG00000265107 | ENST00000621517 |
| GJA8 | ENSG00000121634 | ENST00000369235 |
| GK | ENSG00000198814 | ENST00000378943 |
| GLA | ENSG00000102393 | ENST00000218516 |
| GLI2 | ENSG00000074047 | ENST00000452319 |
| GLI3 | ENSG00000106571 | ENST00000395925 |
| GLMN | ENSG00000174842 | ENST00000370360 |
| GNAS | ENSG00000087460 | ENST00000371102 |
| GPC3 | ENSG00000147257 | ENST00000370818 |
| GREB1L | ENSG00000141449 | ENST00000424526 |
| GRIA3 | ENSG00000125675 | ENST00000620443 |
| GRIN1 | ENSG00000176884 | ENST00000371553 |
| GRIN2A | ENSG00000183454 | ENST00000396573 |
| GRIN2B | ENSG00000273079 | ENST00000609686 |
| GRN | ENSG00000030582 | ENST00000053867 |
| GTF2I | ENSG00000263001 | ENST00000573035 |
| GTF2IRD1 | ENSG00000006704 | ENST00000265755 |
| H2AFX | ENSG00000188486 | ENST00000530167 |
| HCCS | ENSG00000004961 | ENST00000321143 |
| HCN4 | ENSG00000138622 | ENST00000261917 |
| HDAC4 | ENSG00000068024 | ENST00000345617 |
| HIC1 | ENSG00000177374 | ENST00000322941 |
| HIRA | ENSG00000100084 | ENST00000263208 |
| HIVEP2 | ENSG00000010818 | ENST00000367603 |
| HMGA1 | ENSG00000137309 | ENST00000311487 |
| HMGA2 | ENSG00000149948 | ENST00000403681 |
| HNF1A | ENSG00000135100 | ENST00000257555 |
| HNF1B | ENSG00000276194 | ENST00000617811 |
| HNF4A | ENSG00000101076 | ENST00000609795 |
| HNRNPK | ENSG00000165119 | ENST00000384871 |
| HNRNPU | ENSG00000153187 | ENST00000475997 |
| HOXD13 | ENSG00000128714 | ENST00000392539 |
| HPRT1 | ENSG00000165704 | ENST00000298556 |
| HRG | ENSG00000113905 | ENST00000232003 |
| HUWE1 | ENSG00000086758 | ENST00000262854 |
| ID2 | ENSG00000115738 | ENST00000234091 |
| IDS | ENSG00000010404 | ENST00000340855 |
| IGF1 | ENSG00000017427 | ENST00000337514 |
| IGF1R | ENSG00000140443 | ENST00000268035 |
| IGFALS | ENSG00000099769 | ENST00000215539 |
| IKBKG | ENSG00000269335 | ENST00000594239 |
| IKZF1 | ENSG00000185811 | ENST00000331340 |
| IL1RAPL1 | ENSG00000169306 | ENST00000378993 |
| IRF3 | ENSG00000126456 | ENST00000377139 |
| IRF6 | ENSG00000117595 | ENST00000367021 |
| JAG1 | ENSG00000101384 | ENST00000254958 |
| KANSL1 | ENSG00000278458 | ENST00000627698 |
| KAT6B | ENSG00000156650 | ENST00000287239 |
| KCNAB2 | ENSG00000069424 | ENST00000378097 |
| KCNE1 | ENSG00000180509 | ENST00000337385 |
| KCNE2 | ENSG00000159197 | ENST00000290310 |
| KCNH2 | ENSG00000055118 | ENST00000262186 |
| KCNJ18 | ENSG00000260458 | ENST00000567955 |
| KCNJ2 | ENSG00000123700 | ENST00000243457 |
| KCNQ1 | ENSG00000282076 | ENST00000632153 |
| KCNQ2 | ENSG00000281151 | ENST00000627948 |
| KCNQ4 | ENSG00000117013 | ENST00000347132 |
| KDM5C | ENSG00000126012 | ENST00000375401 |
| KDM6A | ENSG00000147050 | ENST00000377967 |
| KHDRBS2 | ENSG00000112232 | ENST00000281156 |
| KIF11 | ENSG00000138160 | ENST00000260731 |
| KIF1B | ENSG00000054523 | ENST00000263934 |
| KLF1 | ENSG00000105610 | ENST00000264834 |
| KLF6 | ENSG00000067082 | ENST00000497571 |
| KLHL10 | ENSG00000161594 | ENST00000293303 |
| KMT2A | ENSG00000118058 | ENST00000389506 |
| KMT2B | ENSG00000272333 | ENST00000420124 |
| KMT2D | ENSG00000167548 | ENST00000301067 |
| KRAS | ENSG00000133703 | ENST00000256078 |
| KRIT1 | ENSG00000001631 | ENST00000394507 |
| KRT5 | ENSG00000186081 | ENST00000252242 |
| KRT74 | ENSG00000170484 | ENST00000305620 |
| L1CAM | ENSG00000198910 | ENST00000370060 |
| LAMA4 | ENSG00000112769 | ENST00000522006 |
| LAMP2 | ENSG00000005893 | ENST00000434600 |
| LDLR | ENSG00000130164 | ENST00000619864 |
| LEMD3 | ENSG00000174106 | ENST00000308330 |
| LETM1 | ENSG00000168924 | ENST00000302787 |
| LGI1 | ENSG00000108231 | ENST00000371418 |
| LHX4 | ENSG00000121454 | ENST00000263726 |
| LIG4 | ENSG00000174405 | ENST00000405925 |
| LIMK1 | ENSG00000106683 | ENST00000336180 |
| LMNA | ENSG00000160789 | ENST00000368300 |
| LMX1B | ENSG00000136944 | ENST00000373474 |
| LRP5 | ENSG00000162337 | ENST00000294304 |
| LZTR1 | ENSG00000099949 | ENST00000215739 |
| MAD2L1 | ENSG00000164109 | ENST00000296509 |
| MAGEL2 | ENSG00000254585 | ENST00000532292 |
| MAGT1 | ENSG00000102158 | ENST00000358075 |
| MAOA | ENSG00000189221 | ENST00000338702 |
| MAP2K1 | ENSG00000169032 | ENST00000307102 |
| MAP2K2 | ENSG00000126934 | ENST00000262948 |
| MAPK10 | ENSG00000109339 | ENST00000395169 |
| MAPKAPK3 | ENSG00000114738 | ENST00000446044 |
| MAPT | ENSG00000277956 | ENST00000626571 |
| MBD5 | ENSG00000204406 | ENST00000407073 |
| MC3R | ENSG00000124089 | ENST00000243911 |
| MC4R | ENSG00000166603 | ENST00000299766 |
| MECP2 | ENSG00000169057 | ENST00000303391 |
| MED13L | ENSG00000123066 | ENST00000281928 |
| MED15 | ENSG00000099917 | ENST00000292733 |
| MEF2C | ENSG00000081189 | ENST00000340208 |
| MEIS2 | ENSG00000134138 | ENST00000424352 |
| MEN1 | ENSG00000133895 | ENST00000394376 |
| MFAP5 | ENSG00000197614 | ENST00000359478 |
| MIB1 | ENSG00000101752 | ENST00000261537 |
| MID1 | ENSG00000101871 | ENST00000380787 |
| MITF | ENSG00000187098 | ENST00000394351 |
| MLH1 | ENSG00000076242 | ENST00000231790 |
| MLLT3 | ENSG00000171843 | ENST00000380338 |
| MME | ENSG00000196549 | ENST00000492661 |
| MNX1 | ENSG00000130675 | ENST00000469500 |
| MPZ | ENSG00000158887 | ENST00000533357 |
| MSH2 | ENSG00000095002 | ENST00000233146 |
| MSH6 | ENSG00000116062 | ENST00000234420 |
| MSX1 | ENSG00000163132 | ENST00000382723 |
| MSX2 | ENSG00000120149 | ENST00000239243 |
| MTAP | ENSG00000099810 | ENST00000380172 |
| MTM1 | ENSG00000171100 | ENST00000370396 |
| MUTYH | ENSG00000132781 | ENST00000372098 |
| MYBPC3 | ENSG00000134571 | ENST00000545968 |
| MYCN | ENSG00000134323 | ENST00000281043 |
| MYF6 | ENSG00000111046 | ENST00000228641 |
| MYH11 | ENSG00000133392 | ENST00000300036 |
| MYH7 | ENSG00000092054 | ENST00000355349 |
| MYH9 | ENSG00000100345 | ENST00000216181 |
| MYLK | ENSG00000065534 | ENST00000360304 |
| MYOC | ENSG00000034971 | ENST00000037502 |
| MYPN | ENSG00000138347 | ENST00000540630 |
| MYT1L | ENSG00000186487 | ENST00000428368 |
| NBN | ENSG00000104320 | ENST00000265433 |
| NCF1 | ENSG00000158517 | ENST00000289473 |
| NCSTN | ENSG00000162736 | ENST00000294785 |
| NDP | ENSG00000124479 | ENST00000378062 |
| NEBL | ENSG00000078114 | ENST00000417816 |
| NEXMIF | ENSG00000050030 | ENST00000055682 |
| NEXN | ENSG00000162614 | ENST00000334785 |
| NF1 | ENSG00000196712 | ENST00000356175 |
| NF2 | ENSG00000186575 | ENST00000338641 |
| NFIA | ENSG00000162599 | ENST00000403491 |
| NFIX | ENSG00000008441 | ENST00000397661 |
| NFKB1 | ENSG00000109320 | ENST00000226574 |
| NFKB2 | ENSG00000077150 | ENST00000369966 |
| NFKBIA | ENSG00000100906 | ENST00000216797 |
| NFRKB | ENSG00000170322 | ENST00000446488 |
| NHS | ENSG00000188158 | ENST00000380060 |
| NIPBL | ENSG00000164190 | ENST00000282516 |
| NKX2-1 | ENSG00000136352 | ENST00000518149 |
| NKX2-5 | ENSG00000183072 | ENST00000329198 |
| NKX3-1 | ENSG00000167034 | ENST00000380871 |
| NLGN4X | ENSG00000146938 | ENST00000381095 |
| NLRP3 | ENSG00000162711 | ENST00000391828 |
| NODAL | ENSG00000156574 | ENST00000287139 |
| NOG | ENSG00000183691 | ENST00000332822 |
| NOTCH1 | ENSG00000148400 | ENST00000277541 |
| NPAS3 | ENSG00000151322 | ENST00000346562 |
| NPM1 | ENSG00000181163 | ENST00000517671 |
| NPRL3 | ENSG00000103148 | ENST00000620134 |
| NR0B1 | ENSG00000169297 | ENST00000378970 |
| NR2F2 | ENSG00000185551 | ENST00000410719 |
| NR5A1 | ENSG00000136931 | ENST00000373588 |
| NRXN1 | ENSG00000179915 | ENST00000401669 |
| NSD1 | ENSG00000165671 | ENST00000439151 |
| NSDHL | ENSG00000147383 | ENST00000370274 |
| NT5E | ENSG00000135318 | ENST00000257770 |
| NUP98 | ENSG00000110713 | ENST00000324932 |
| NUS1 | ENSG00000153989 | ENST00000368494 |
| NXF5 | ENSG00000126952 | ENST00000473265 |
| NYX | ENSG00000188937 | ENST00000342595 |
| OCRL | ENSG00000122126 | ENST00000371113 |
| OFD1 | ENSG00000046651 | ENST00000340096 |
| OPA1 | ENSG00000198836 | ENST00000361908 |
| OPHN1 | ENSG00000079482 | ENST00000355520 |
| OTC | ENSG00000036473 | ENST00000039007 |
| OTX2 | ENSG00000165588 | ENST00000555006 |
| P2RX5 | ENSG00000083454 | ENST00000225328 |
| P2RY8 | ENSG00000182162 | ENST00000381297 |
| PAFAH1B1 | ENSG00000007168 | ENST00000397195 |
| PAK2 | ENSG00000180370 | ENST00000327134 |
| PAK3 | ENSG00000077264 | ENST00000446737 |
| PARK2 | ENSG00000185345 | ENST00000366898 |
| PAX1 | ENSG00000125813 | ENST00000398485 |
| PAX2 | ENSG00000075891 | ENST00000355243 |
| PAX3 | ENSG00000135903 | ENST00000392070 |
| PAX5 | ENSG00000196092 | ENST00000358127 |
| PAX6 | ENSG00000007372 | ENST00000379132 |
| PAX8 | ENSG00000125618 | ENST00000429538 |
| PAX9 | ENSG00000198807 | ENST00000402703 |
| PCDH19 | ENSG00000165194 | ENST00000255531 |
| PCGF2 | ENSG00000278644 | ENST00000631566 |
| PDHA1 | ENSG00000131828 | ENST00000545074 |
| PDLIM3 | ENSG00000154553 | ENST00000284770 |
| PGAP1 | ENSG00000197121 | ENST00000354764 |
| PGK1 | ENSG00000102144 | ENST00000373316 |
| PHB2 | ENSG00000215021 | ENST00000535923 |
| PHEX | ENSG00000102174 | ENST00000379374 |
| PHF6 | ENSG00000156531 | ENST00000370803 |
| PHF8 | ENSG00000172943 | ENST00000338154 |
| PHIP | ENSG00000146247 | ENST00000275034 |
| PHOX2B | ENSG00000109132 | ENST00000226382 |
| PIGA | ENSG00000165195 | ENST00000333590 |
| PIK3R1 | ENSG00000145675 | ENST00000521381 |
| PINK1 | ENSG00000158828 | ENST00000622012 |
| PITX2 | ENSG00000164093 | ENST00000306732 |
| PITX3 | ENSG00000107859 | ENST00000370002 |
| PKD1 | ENSG00000008710 | ENST00000612014 |
| PKD2 | ENSG00000118762 | ENST00000237596 |
| PKP2 | ENSG00000057294 | ENST00000340811 |
| PLIN1 | ENSG00000166819 | ENST00000430628 |
| PLK4 | ENSG00000142731 | ENST00000270861 |
| PLP1 | ENSG00000123560 | ENST00000612423 |
| PMP22 | ENSG00000109099 | ENST00000312280 |
| PNPLA6 | ENSG00000032444 | ENST00000221249 |
| POLG2 | ENSG00000256525 | ENST00000539111 |
| POLR1D | ENSG00000186184 | ENST00000302979 |
| POLR2F | ENSG00000100142 | ENST00000442738 |
| PORCN | ENSG00000102312 | ENST00000359882 |
| POT1 | ENSG00000128513 | ENST00000357628 |
| PPARA | ENSG00000186951 | ENST00000262735 |
| PPARG | ENSG00000132170 | ENST00000287820 |
| PQBP1 | ENSG00000102103 | ENST00000376563 |
| PRKAG2 | ENSG00000106617 | ENST00000287878 |
| PRKAR1A | ENSG00000108946 | ENST00000392711 |
| PRM1 | ENSG00000175646 | ENST00000312511 |
| PRM2 | ENSG00000122304 | ENST00000241808 |
| PRMT7 | ENSG00000132600 | ENST00000339507 |
| PRODH | ENSG00000100033 | ENST00000610940 |
| PROX1 | ENSG00000117707 | ENST00000498508 |
| PRPF31 | ENSG00000277953 | ENST00000622636 |
| PRPS1 | ENSG00000147224 | ENST00000372435 |
| PRRT2 | ENSG00000167371 | ENST00000358758 |
| PSMD12 | ENSG00000197170 | ENST00000356126 |
| PTCH1 | ENSG00000185920 | ENST00000331920 |
| PTEN | ENSG00000171862 | ENST00000371953 |
| PTHLH | ENSG00000087494 | ENST00000201015 |
| PTPN11 | ENSG00000179295 | ENST00000351677 |
| PUM1 | ENSG00000134644 | ENST00000257075 |
| QRICH1 | ENSG00000198218 | ENST00000395443 |
| RAB39B | ENSG00000155961 | ENST00000369454 |
| RAD50 | ENSG00000113522 | ENST00000378823 |
| RAD51 | ENSG00000051180 | ENST00000267868 |
| RAD51B | ENSG00000182185 | ENST00000471583 |
| RAE1 | ENSG00000101146 | ENST00000395841 |
| RAI1 | ENSG00000108557 | ENST00000353383 |
| RANGRF | ENSG00000108961 | ENST00000226105 |
| RASA1 | ENSG00000145715 | ENST00000274376 |
| RASSF1 | ENSG00000068028 | ENST00000357043 |
| RB1 | ENSG00000139687 | ENST00000267163 |
| RBFOX1 | ENSG00000078328 | ENST00000311745 |
| RBM20 | ENSG00000203867 | ENST00000369519 |
| RBPJ | ENSG00000168214 | ENST00000342295 |
| RELN | ENSG00000189056 | ENST00000343529 |
| RET | ENSG00000165731 | ENST00000355710 |
| RFC2 | ENSG00000049541 | ENST00000055077 |
| RNF135 | ENSG00000181481 | ENST00000328381 |
| ROBO1 | ENSG00000169855 | ENST00000495273 |
| ROR2 | ENSG00000169071 | ENST00000375708 |
| RP2 | ENSG00000102218 | ENST00000218340 |
| RPRM | ENSG00000177519 | ENST00000325926 |
| RPS17 | ENSG00000278229 | ENST00000617731 |
| RPS19 | ENSG00000105372 | ENST00000598742 |
| RPS20 | ENSG00000008988 | ENST00000009589 |
| RPS24 | ENSG00000138326 | ENST00000372360 |
| RPS26 | ENSG00000197728 | ENST00000356464 |
| RPS28 | ENSG00000233927 | ENST00000600659 |
| RPS29 | ENSG00000213741 | ENST00000245458 |
| RPS4X | ENSG00000198034 | ENST00000316084 |
| RPS6KA3 | ENSG00000177189 | ENST00000379565 |
| RS1 | ENSG00000102104 | ENST00000379984 |
| RTN2 | ENSG00000125744 | ENST00000344680 |
| RTN4R | ENSG00000040608 | ENST00000043402 |
| RUNX1 | ENSG00000159216 | ENST00000300305 |
| RUNX2 | ENSG00000124813 | ENST00000371432 |
| RYR1 | ENSG00000196218 | ENST00000359596 |
| RYR2 | ENSG00000198626 | ENST00000366574 |
| SALL1 | ENSG00000103449 | ENST00000251020 |
| SALL3 | ENSG00000277015 | ENST00000614883 |
| SALL4 | ENSG00000101115 | ENST00000217086 |
| SATB2 | ENSG00000119042 | ENST00000457245 |
| SBDS | ENSG00000126524 | ENST00000246868 |
| SCN10A | ENSG00000185313 | ENST00000449082 |
| SCN1A | ENSG00000144285 | ENST00000375405 |
| SCN2A | ENSG00000136531 | ENST00000631182 |
| SCN5A | ENSG00000183873 | ENST00000333535 |
| SCN8A | ENSG00000196876 | ENST00000354534 |
| SDHAF2 | ENSG00000167985 | ENST00000301761 |
| SDHB | ENSG00000117118 | ENST00000375499 |
| SDHC | ENSG00000143252 | ENST00000367975 |
| SDHD | ENSG00000204370 | ENST00000375549 |
| SEM1 | ENSG00000127922 | ENST00000248566 |
| SEMA3A | ENSG00000075213 | ENST00000265362 |
| SEMA5A | ENSG00000112902 | ENST00000382496 |
| SETBP1 | ENSG00000152217 | ENST00000282030 |
| SETD5 | ENSG00000168137 | ENST00000402198 |
| SF1 | ENSG00000168066 | ENST00000227503 |
| SF3B4 | ENSG00000143368 | ENST00000271628 |
| SGCE | ENSG00000127990 | ENST00000265735 |
| SH2B1 | ENSG00000178188 | ENST00000337120 |
| SH2D1A | ENSG00000183918 | ENST00000371139 |
| SH3BP2 | ENSG00000087266 | ENST00000452765 |
| SH3TC2 | ENSG00000169247 | ENST00000515425 |
| SHANK3 | ENSG00000251322 | ENST00000262795 |
| SHH | ENSG00000164690 | ENST00000297261 |
| SHMT1 | ENSG00000176974 | ENST00000617912 |
| SHOC2 | ENSG00000108061 | ENST00000369452 |
| SHOX | ENSG00000185960 | ENST00000381578 |
| SI | ENSG00000090402 | ENST00000264382 |
| SIM1 | ENSG00000112246 | ENST00000369208 |
| SIN3A | ENSG00000169375 | ENST00000360439 |
| SIX3 | ENSG00000138083 | ENST00000260653 |
| SIX6 | ENSG00000184302 | ENST00000327720 |
| SLC16A12 | ENSG00000152779 | ENST00000371790 |
| SLC16A2 | ENSG00000147100 | ENST00000587091 |
| SLC2A1 | ENSG00000117394 | ENST00000426263 |
| SLC33A1 | ENSG00000169359 | ENST00000392845 |
| SLC36A2 | ENSG00000186335 | ENST00000335244 |
| SLC40A1 | ENSG00000138449 | ENST00000261024 |
| SLC4A10 | ENSG00000144290 | ENST00000415876 |
| SLC52A1 | ENSG00000132517 | ENST00000424747 |
| SLC5A3 | ENSG00000198743 | ENST00000381151 |
| SLC5A7 | ENSG00000115665 | ENST00000264047 |
| SLC6A8 | ENSG00000130821 | ENST00000253122 |
| SLC9A3R1 | ENSG00000109062 | ENST00000581999 |
| SLC9A6 | ENSG00000198689 | ENST00000370695 |
| SMAD3 | ENSG00000166949 | ENST00000327367 |
| SMAD4 | ENSG00000141646 | ENST00000398417 |
| SMAD5 | ENSG00000113658 | ENST00000545620 |
| SMARCA4 | ENSG00000127616 | ENST00000589677 |
| SMARCB1 | ENSG00000275837 | ENST00000629690 |
| SMARCC1 | ENSG00000173473 | ENST00000254480 |
| SMS | ENSG00000102172 | ENST00000404933 |
| SNCA | ENSG00000145335 | ENST00000336904 |
| SNURF | ENSG00000273173 | ENST00000338327 |
| SOCS1 | ENSG00000185338 | ENST00000332029 |
| SON | ENSG00000159140 | ENST00000436227 |
| SOX10 | ENSG00000100146 | ENST00000360880 |
| SOX11 | ENSG00000176887 | ENST00000322002 |
| SOX18 | ENSG00000203883 | ENST00000340356 |
| SOX2 | ENSG00000181449 | ENST00000325404 |
| SOX5 | ENSG00000134532 | ENST00000546136 |
| SOX8 | ENSG00000005513 | ENST00000293894 |
| SOX9 | ENSG00000125398 | ENST00000245479 |
| SPAST | ENSG00000021574 | ENST00000615843 |
| SPINK1 | ENSG00000164266 | ENST00000296695 |
| SPR | ENSG00000116096 | ENST00000234454 |
| SPRED1 | ENSG00000166068 | ENST00000299084 |
| SPTBN2 | ENSG00000173898 | ENST00000533211 |
| SRGAP3 | ENSG00000196220 | ENST00000383836 |
| SRY | ENSG00000184895 | ENST00000383070 |
| ST7 | ENSG00000004866 | ENST00000622083 |
| STAT5A | ENSG00000126561 | ENST00000345506 |
| STAT5B | ENSG00000173757 | ENST00000293328 |
| STK11 | ENSG00000118046 | ENST00000326873 |
| STK25 | ENSG00000115694 | ENST00000316586 |
| STS | ENSG00000101846 | ENST00000217961 |
| STXBP1 | ENSG00000136854 | ENST00000373299 |
| SUMO1 | ENSG00000116030 | ENST00000392246 |
| SUZ12 | ENSG00000178691 | ENST00000322652 |
| SYN1 | ENSG00000008056 | ENST00000295987 |
| SYNGAP1 | ENSG00000227460 | ENST00000629380 |
| TAB2 | ENSG00000055208 | ENST00000367456 |
| TBK1 | ENSG00000183735 | ENST00000331710 |
| TBX1 | ENSG00000184058 | ENST00000332710 |
| TBX20 | ENSG00000164532 | ENST00000408931 |
| TBX22 | ENSG00000277800 | ENST00000619509 |
| TBX3 | ENSG00000135111 | ENST00000257566 |
| TBX4 | ENSG00000121075 | ENST00000240335 |
| TBX5 | ENSG00000089225 | ENST00000310346 |
| TCF12 | ENSG00000140262 | ENST00000438423 |
| TCF4 | ENSG00000196628 | ENST00000356073 |
| TCOF1 | ENSG00000070814 | ENST00000377797 |
| TDGF1 | ENSG00000241186 | ENST00000296145 |
| TERC | ENSG00000270141 | ENST00000602385 |
| TERT | ENSG00000164362 | ENST00000310581 |
| TFAP2B | ENSG00000008196 | ENST00000393655 |
| TFRC | ENSG00000072274 | ENST00000360110 |
| TGFB1 | ENSG00000105329 | ENST00000221930 |
| TGFBR1 | ENSG00000106799 | ENST00000374994 |
| TGFBR2 | ENSG00000163513 | ENST00000295754 |
| TGIF1 | ENSG00000177426 | ENST00000550958 |
| TIMM8A | ENSG00000126953 | ENST00000372902 |
| TKT | ENSG00000163931 | ENST00000462138 |
| TLK2 | ENSG00000146872 | ENST00000346027 |
| TLR3 | ENSG00000164342 | ENST00000296795 |
| TM4SF20 | ENSG00000168955 | ENST00000304568 |
| TMPO | ENSG00000120802 | ENST00000266732 |
| TNNI3 | ENSG00000129991 | ENST00000344887 |
| TNNT2 | ENSG00000118194 | ENST00000236918 |
| TNXA | ENSG00000224140 | ENST00000423622 |
| TNXB | ENSG00000236236 | ENST00000550539 |
| TOP3A | ENSG00000177302 | ENST00000542570 |
| TP53 | ENSG00000141510 | ENST00000269305 |
| TP53BP2 | ENSG00000143514 | ENST00000343537 |
| TP63 | ENSG00000073282 | ENST00000354600 |
| TP73 | ENSG00000078900 | ENST00000378295 |
| TPM1 | ENSG00000140416 | ENST00000288398 |
| TRAPPC2 | ENSG00000196459 | ENST00000359680 |
| TRIP12 | ENSG00000153827 | ENST00000283943 |
| TRPM4 | ENSG00000130529 | ENST00000252826 |
| TRPS1 | ENSG00000104447 | ENST00000395715 |
| TRPV4 | ENSG00000111199 | ENST00000261740 |
| TSC1 | ENSG00000165699 | ENST00000298552 |
| TSC2 | ENSG00000103197 | ENST00000219476 |
| TSPAN7 | ENSG00000156298 | ENST00000378482 |
| TTN | ENSG00000155657 | ENST00000589042 |
| TWIST1 | ENSG00000122691 | ENST00000242261 |
| TYRP1 | ENSG00000107165 | ENST00000388918 |
| UBE2A | ENSG00000077721 | ENST00000371558 |
| UBE3A | ENSG00000114062 | ENST00000232165 |
| UPF3B | ENSG00000125351 | ENST00000276201 |
| USP7 | ENSG00000187555 | ENST00000344836 |
| USP9X | ENSG00000124486 | ENST00000324545 |
| VAMP1 | ENSG00000139190 | ENST00000396308 |
| VEGFA | ENSG00000112715 | ENST00000425836 |
| VEGFC | ENSG00000150630 | ENST00000618562 |
| VHL | ENSG00000134086 | ENST00000256474 |
| WDR26 | ENSG00000162923 | ENST00000414423 |
| WDR45 | ENSG00000196998 | ENST00000356463 |
| WNT2B | ENSG00000134245 | ENST00000369684 |
| WT1 | ENSG00000184937 | ENST00000332351 |
| WWOX | ENSG00000186153 | ENST00000566780 |
| XIAP | ENSG00000101966 | ENST00000434753 |
| XRCC5 | ENSG00000079246 | ENST00000392133 |
| YAP1 | ENSG00000137693 | ENST00000282441 |
| YWHAE | ENSG00000274474 | ENST00000627231 |
| ZC4H2 | ENSG00000126970 | ENST00000374839 |
| ZDHHC9 | ENSG00000188706 | ENST00000357166 |
| ZEB2 | ENSG00000169554 | ENST00000627532 |
| ZFPM2 | ENSG00000169946 | ENST00000407775 |
| ZIC1 | ENSG00000152977 | ENST00000282928 |
| ZIC2 | ENSG00000043355 | ENST00000376335 |
| ZIC3 | ENSG00000156925 | ENST00000287538 |
| ZIC4 | ENSG00000174963 | ENST00000383075 |
| ZMPSTE24 | ENSG00000084073 | ENST00000372759 |
| ZNF41 | ENSG00000147124 | ENST00000377065 |
| ZNF462 | ENSG00000148143 | ENST00000277225 |
| ZNF674 | ENSG00000251192 | ENST00000523374 |
| ZNF711 | ENSG00000147180 | ENST00000373165 |

TABLE 6
Examples of functional non-coding mutations targetable by SHAPE

| Gene name | Chr | Start | Stop | Mutation | Consequence |
|---|---|---|---|---|---|
| A20 | chr6 | 138230039 | 138230039 | TT > A | Loss of NF-kB binding; |
| | | | | | Decreasing of enhancer |
| | | | | | activity |
| A20 | chr6 | 138230040 | 138230040 | TT > A | Loss of NF-kB binding; |
| | | | | | Decreasing of enhancer |
| | | | | | activity |
| ABCG2 | chr4 | 88924371 | 88924371 | A > G | Decreasing of enhancer |
| | | | | | activity |
| ABCG2 | chr4 | 89073197 | 89073197 | A > C | Decreasing of enhancer |
| | | | | | activity |
| ACSBG1 | chr15 | 78292380 | 78292380 | A > G | Decreasing of enhancer |
| | | | | | activity |
| ACSBG1 | chr15 | 78292544 | 78292544 | G > A | Decreasing of enhancer |
| | | | | | activity |
| ACSBG1 | chr15 | 78292823 | 78292823 | G > C | Decreasing of enhancer |
| | | | | | activity |
| ADAP1 | chr7 | 982031 | 982031 | G > C | Change of ATF5 binding |
| ADAP1 | chr7 | 982031 | 982031 | G > C | Change of BCL11A binding |
| ADAP1 | chr7 | 982031 | 982031 | G > C | Change of SPI1 binding |
| ADAP1 | chr7 | 982031 | 982031 | G > C | Change of ZNF227 binding |
| ADAP1 | chr7 | 982031 | 982031 | G > C | Change of ZNF263 binding |
| ADAP1 | chr7 | 982031 | 982031 | G > C | Change of ZNF281 binding |
| ADAP1 | chr7 | 982159 | 982159 | G > T | Change of ELF2 binding |
| ADAP1 | chr7 | 982159 | 982159 | G > T | Change of HOXC5 binding |
| ADAP1 | chr7 | 982159 | 982159 | G > T | Change of MAZ binding |
| ADAP1 | chr7 | 982159 | 982159 | G > T | Change of SPI1 binding |
| ADAP1 | chr7 | 982159 | 982159 | G > T | Change of TAF1 binding |
| ADAP1 | chr7 | 982159 | 982159 | G > T | Change of ZNF263 binding |
| ADAP1 | chr7 | 982159 | 982159 | G > T | Change of ZNF281 binding |
| ADAP1 | chr7 | 982159 | 982159 | G > T | Change of ZNF658B binding |
| ADAP1 | chr7 | 982233 | 982233 | G > A | Change of ATF5 binding |
| ADAP1 | chr7 | 982233 | 982233 | G > A | Change of BCL11A binding |
| ADAP1 | chr7 | 982233 | 982233 | G > A | Change of HOXC5 binding |
| ADAP1 | chr7 | 982233 | 982233 | G > A | Change of SPI1 binding |
| ADAP1 | chr7 | 982233 | 982233 | G > A | Change of ZNF227 binding |
| ADAP1 | chr7 | 982233 | 982233 | G > A | Change of ZNF263 binding |
| ADAP1 | chr7 | 982233 | 982233 | G > A | Change of ZNF658B binding |
| ADAP1 | chr7 | 982258 | 982258 | G > C | Change of ELF2 binding |
| ADAP1 | chr7 | 982258 | 982258 | G > C | Change of HOXC5 binding |
| ADAP1 | chr7 | 982258 | 982258 | G > C | Change of MAZ binding |
| ADAP1 | chr7 | 982258 | 982258 | G > C | Change of SPI1 binding |
| ADAP1 | chr7 | 982258 | 982258 | G > C | Change of TAF1 binding |
| ADAP1 | chr7 | 982258 | 982258 | G > C | Change of ZNF263 binding |
| ADAP1 | chr7 | 982258 | 982258 | G > C | Change of ZNF281 binding |
| ADAP1 | chr7 | 982258 | 982258 | G > C | Change of ZNF658B binding |
| ADAP1 | chr7 | 982269 | 982269 | G > A | Change of ELF2 binding |
| ADAP1 | chr7 | 982269 | 982269 | G > A | Change of HOXC5 binding |
| ADAP1 | chr7 | 982269 | 982269 | G > A | Change of MAZ binding |
| ADAP1 | chr7 | 982269 | 982269 | G > A | Change of SPI1 binding |
| ADAP1 | chr7 | 982269 | 982269 | G > A | Change of TAF1 binding |
| ADAP1 | chr7 | 982269 | 982269 | G > A | Change of ZNF263 binding |
| ADAP1 | chr7 | 982269 | 982269 | G > A | Change of ZNF658B binding |
| ADAP1 | chr7 | 982401 | 982401 | A > G | Change of HOXC5 binding |
| ADAP1 | chr7 | 982401 | 982401 | A > G | Change of MAZ binding |
| ADAP1 | chr7 | 982401 | 982401 | A > G | Change of SPI1 binding |
| ADAP1 | chr7 | 982401 | 982401 | A > G | Change of TAF1 binding |
| ADAP1 | chr7 | 982401 | 982401 | A > G | Change of ZNF263 binding |
| ADAP1 | chr7 | 982401 | 982401 | A > G | Change of ZNF658B binding |
| ADAP1 | chr7 | 982407 | 982407 | A > G | Change of HOXC5 binding |
| ADAP1 | chr7 | 982407 | 982407 | A > G | Change of MAZ binding |
| ADAP1 | chr7 | 982407 | 982407 | A > G | Change of SPI1 binding |
| ADAP1 | chr7 | 982407 | 982407 | A > G | Change of TAF1 binding |
| ADAP1 | chr7 | 982407 | 982407 | A > G | Change of ZNF263 binding |
| ADAP1 | chr7 | 982407 | 982407 | A > G | Change of ZNF658B binding |
| ADAP1 | chr7 | 982877 | 982877 | A > T | Change of ATF5 binding |
| ADAP1 | chr7 | 982877 | 982877 | A > T | Change of HOXC5 binding |
| ADAP1 | chr7 | 982877 | 982877 | A > T | Change of MAZ binding |
| ADAP1 | chr7 | 982877 | 982877 | A > T | Change of TAF1 binding |
| ADAP1 | chr7 | 982877 | 982877 | A > T | Change of ZNF227 binding |
| ADAP1 | chr7 | 982877 | 982877 | A > T | Change of ZNF263 binding |
| ADAP1 | chr7 | 982877 | 982877 | A > T | Change of ZNF281 binding |
| ADAP1 | chr7 | 982877 | 982877 | A > T | Change of ZNF658B binding |
| ADAP1 | chr7 | 982891 | 982891 | G > A | Change of ATF5 binding |
| ADAP1 | chr7 | 982891 | 982891 | G > A | Change of BCL11A binding |
| ADAP1 | chr7 | 982891 | 982891 | G > A | Change of HOXC5 binding |
| ADAP1 | chr7 | 982891 | 982891 | G > A | Change of MAZ binding |
| ADAP1 | chr7 | 982891 | 982891 | G > A | Change of SPI1 binding |
| ADAP1 | chr7 | 982891 | 982891 | G > A | Change of TAF1 binding |
| ADAP1 | chr7 | 982891 | 982891 | G > A | Change of ZNF227 binding |
| ADAP1 | chr7 | 982891 | 982891 | G > A | Change of ZNF263 binding |
| ADAP1 | chr7 | 982891 | 982891 | G > A | Change of ZNF658B binding |
| ADAP1 | chr7 | 983223 | 983223 | G > C | Change of ATF5 binding |
| ADAP1 | chr7 | 983223 | 983223 | G > C | Change of BCL11A binding |
| ADAP1 | chr7 | 983223 | 983223 | G > C | Change of HOXC5 binding |
| ADAP1 | chr7 | 983223 | 983223 | G > C | Change of SPI1 binding |
| ADAP1 | chr7 | 983223 | 983223 | G > C | Change of ZNF227 binding |
| ADAP1 | chr7 | 983223 | 983223 | G > C | Change of ZNF263 binding |
| ADCY5 | chr3 | 123065778 | 123065778 | A > G | Increasing of enhancer |
| | | | | | activity |
| ADGRL3 | chr4 | 62861941 | 62861941 | G > C | Gain of HRE motif; Loss of |
| | | | | | GRHL1 and TCFCP2L1 motif; |
| | | | | | Decreasing of enhancer |
| | | | | | activity |
| ADGRL3 | chr4 | 62862251 | 62862251 | G > A | Gain of LHX3; BRN3; POU6F2; |
| | | | | | BRN2; OCT1; PIT1 and OC2 |
| | | | | | motif; Loss of PAX2; YYl and |
| | | | | | CRX motif; Decreasing of |
| | | | | | enhancer activity |
| ADGRL3 | chr4 | 62861964 | 62861964 | A > T | Gain of TAXCREB motif; |
| | | | | | Decreasing of enhancer |
| | | | | | activity |
| ADH4 | chr4 | 100078751 | 100078751 | T > G | Loss of enhancer activity |
| ADH4 | chr4 | 100078890 | 100078890 | G > T | Loss of enhancer activity |
| ADO | chr10 | 64445564 | 64445564 | A > G | Increasing of enhancer |
| | | | | | activity |
| ADO | chr10 | 64445564 | 64445564 | A > G | Increasing of enhancer |
| | | | | | activity |
| ADO | chr10 | 64445564 | 64445564 | A > G | Increasing of enhancer |
| | | | | | activity |
| ADO | chr10 | 64445564 | 64445564 | A > G | Increasing of enhancer |
| | | | | | activity |
| ADO | chr10 | 64445564 | 64445564 | A > G | Increasing of enhancer |
| | | | | | activity |
| ADO | chr10 | 64445564 | 64445564 | A > G | Increasing of enhancer |
| | | | | | activity |
| ADSL | chr22 | 40742514 | 40742514 | T > C | Decreasing of enhancer |
| | | | | | activity |
| AFP | chr4 | 74301817 | 74301817 | G > A | Gain of GMEB1 binding; |
| | | | | | Increasing of enhancer |
| | | | | | activity |
| AGAP7P | chr10 | 51549496 | 51549496 | | |
| AGAP7P | chr10 | 51543344 | 51543344 | C > T | Loss of HOXB-like binding; |
| | | | | | Gain of enhancer activity |
| AKT1 | chr14 | 105217554 | 105217554 | G > C | Change of CIC binding |
| AKT1 | chr14 | 105217554 | 105217554 | G > C | Change of NFYA binding |
| AKT1 | chr14 | 105222648 | 105222648 | G > A | Change of ZAC binding |
| AKT1 | chr14 | 105269669 | 105269669 | C > T | Change of ZNF441 binding |
| AKT1 | chr14 | 105444532 | 105444532 | T > G | Change of ZNF579 binding |
| AKT1 | chr14 | 105246325 | 105246325 | T > A | Gain of YY1 binding; Gain of |
| | | | | | enhancer |
| ALAS2 | chrX | 55057617 | 55057617 | G > C | Decreasing of enhancer |
| | | | | | activity |
| ALDOB | chr9 | 104198194 | 104198194 | C > T | Decreasing of enhancer |
| | | | | | activity |
| ALPL | chr1 | 21660786 | 21660786 | C > G | Decreasing of enhancer |
| | | | | | activity |
| ALPL | chr1 | 21661555 | 21661555 | T > G | Decreasing of enhancer |
| | | | | | activity |
| ALPL | chr1 | 21661745 | 21661745 | C > G | Decreasing of enhancer |
| | | | | | activity |
| ALPL | chr1 | 21661878 | 21661878 | C > T | Decreasing of enhancer |
| | | | | | activity |
| ANKEF1 | chr20 | 10016207 | 10016207 | C > G | Loss of GATA2 motif; Loss of |
| | | | | | enhancer activity |
| ANKRD26 | chr10 | 27389383 | 27389383 | C > T | Gain of KLF3;GMEB1; REL; |
| | | | | | SIX2 binding; Increasing of |
| | | | | | enhancer activity |
| ANRIL | chr9 | 22124477 | 22124477 | A > G | Loss of STAT1 motif; |
| | | | | | Decreasing of enhancer |
| | | | | | activity |
| ANRIL | chr9 | 22119195 | 22119195 | | Gain of enhancer activity |
| ANRIL | chr9 | 22118102 | 22118102 | T > G | Increasing of TCF7L2 and |
| | | | | | EP300 binding; Increasing of |
| | | | | | enhancer activity |
| ARFGAP1 | chr20 | 62116270 | 62116270 | A > G | Increasing of enhancer |
| | | | | | activity |
| ARFGAP1 | chr20 | 62116557 | 62116557 | C > T | Increasing of enhancer |
| | | | | | activity |
| ARFGAP1 | chr20 | 62116577 | 62116577 | C > T | Increasing of enhancer |
| | | | | | activity |
| ARFGAP1 | chr20 | 62116662 | 62116662 | A > C | Increasing of enhancer |
| | | | | | activity |
| ARFGAP1 | chr20 | 62116771 | 62116771 | C > T | Increasing of enhancer |
| | | | | | activity |
| ARFGAP1 | chr20 | 62116885 | 62116885 | G > T | Increasing of enhancer |
| | | | | | activity |
| ARFGAP1 | chr20 | 62117295 | 62117295 | T > A | Increasing of enhancer |
| | | | | | activity |
| ARFGAP1 | chr20 | 62117683 | 62117683 | G > T | Increasing of enhancer |
| | | | | | activity |
| ARFGAP1 | chr20 | 62117868 | 62117868 | C > T | Increasing of enhancer |
| | | | | | activity |
| ARFGAP1 | chr20 | 62118212 | 62118212 | C > T | Increasing of enhancer |
| | | | | | activity |
| ARFGAP1 | chr20 | 62118213 | 62118213 | C > T | Increasing of enhancer |
| | | | | | activity |
| ARFGAP1 | chr20 | 62118250 | 62118250 | C > T | Increasing of enhancer |
| | | | | | activity |
| ARFGAP1 | chr20 | 62118282 | 62118282 | A > G | Increasing of enhancer |
| | | | | | activity |
| ARFGAP1 | chr20 | 62118486 | 62118486 | C > T | Increasing of enhancer |
| | | | | | activity |
| ARFGAP1 | chr20 | 62119030 | 62119030 | G > T | Increasing of enhancer |
| | | | | | activity |
| ARFGAP1 | chr20 | 62119047 | 62119047 | C > A | Increasing of enhancer |
| | | | | | activity |
| ARID1A | chr1 | 26438008 | 26438008 | G > A | Change of EBF1 binding |
| ARID1A | chr1 | 26438008 | 26438008 | G > A | Change of HINFP binding |
| ARID1A | chr1 | 26438008 | 26438008 | G > A | Change of SP4 binding |
| ARID1A | chr1 | 26438008 | 26438008 | G > A | Change of TFAP2E binding |
| ARID1A | chr1 | 26438008 | 26438008 | G > A | Change of ZFX binding |
| ARID1A | chr1 | 26798607 | 26798607 | G > A | Change of ELF2 binding |
| ARID1A | chr1 | 26798607 | 26798607 | G > A | Change of EP300 binding |
| ARID1A | chr1 | 26798607 | 26798607 | G > A | Change of TAF1 binding |
| ARID1A | chr1 | 26798607 | 26798607 | G > A | Change of ZBTB7B binding |
| ARID1A | chr1 | 26798607 | 26798607 | G > A | Change of ZNF181 binding |
| ARID1A | chr1 | 26798607 | 26798607 | G > A | Change of ZNF263 binding |
| ARID1A | chr1 | 26798607 | 26798607 | G > A | Change of ZNF383 binding |
| ARID1A | chr1 | 26798607 | 26798607 | G > A | Change of ZNF436 binding |
| ARID1A | chr1 | 26798607 | 26798607 | G > A | Change of ZNF691 binding |
| ARID1A | chr1 | 26798607 | 26798607 | G > A | Change of ZSCAN2 binding |
| ARID1A | chr1 | 26798742 | 26798742 | A > C | Change of HEYL binding |
| ARID1A | chr1 | 26798742 | 26798742 | A > C | Change of ZNF521 binding |
| ARID1A | chr1 | 26798742 | 26798742 | A > C | Change of ZNF546 binding |
| ARID1A | chr1 | 27098601 | 27098601 | G > A | Change of EZF2 binding |
| ARID1A | chr1 | 27098601 | 27098601 | G > A | Change of ZNF729 binding |
| ARID1A | chr1 | 27098601 | 27098601 | G > A | Change of ZNF853 binding |
| ARID1A | chr1 | 27492915 | 27492915 | C > T | Change of APAK binding |
| ARID1A | chr1 | 27492915 | 27492915 | C > T | Change of MZF1 binding |
| ARID1A | chr1 | 27492915 | 27492915 | C > T | Change of ZIM2 binding |
| ARID1A | chr1 | 27492915 | 27492915 | C > T | Change of ZNF407 binding |
| ARID1A | chr1 | 27492915 | 27492915 | C > T | Change of ZNF493 binding |
| ARID1A | chr1 | 27492915 | 27492915 | C > T | Change of ZNF530 binding |
| ARID1A | chr1 | 27492915 | 27492915 | C > T | Change of ZNF816A binding |
| ARID1A | chr1 | 27720081 | 27720081 | G > A | Change of GATA2 binding |
| ARID1A | chr1 | 27720081 | 27720081 | G > A | Change of ZNF814 binding |
| ARID1B | chr6 | 156984421 | 156984421 | A > T | Change of FUBP1 binding |
| ARID1B | chr6 | 157041328 | 157041328 | G > A | Change of SP4 binding |
| ARID1B | chr6 | 157041328 | 157041328 | G > A | Change of TFAP2E binding |
| ARID1B | chr6 | 157041328 | 157041328 | G > A | Change of ZFX binding |
| ARID1B | chr6 | 157110896 | 157110896 | G > A | Change of RXRB binding |
| ARID1B | chr6 | 157110896 | 157110896 | G > A | Change of THRA binding |
| ARID1B | chr6 | 157110896 | 157110896 | G > A | Change of THRB binding |
| ARID1B | chr6 | 157110896 | 157110896 | G > A | Change of ZNF583 binding |
| ARID1B | chr6 | 157154547 | 157154547 | C > T | Change of ZNF492 binding |
| ARID1B | chr6 | 157154547 | 157154547 | C > T | Change of ZNF570 binding |
| ARID1B | chr6 | 157154547 | 157154547 | C > T | Change of ZNF729 binding |
| ARID1B | chr6 | 157389974 | 157389974 | A > G | Change of POU1F1 binding |
| ARLTS1 | chr13 | 50945011 | 50945011 | G > A | Loss of CDC5 motif; Gain of |
| | | | | | PLZF motif; Decreasing of |
| | | | | | enhancer activity |
| ASMT | chrX | 1733783 | 1733783 | A > G | Gain of FOXH1 binding; |
| | | | | | Decreasing of enhancer |
| | | | | | activity |
| ASMT | chrX | 1733892 | 1733892 | C > G | Gain of MAFG; NRL; HEY2 |
| | | | | | binding; Decreasing of |
| | | | | | enhancer activity |
| ATAD3B | chr1 | 928703 | 928703 | C > G | Increasing of enhancer |
| | | | | | activity |
| ATAD3B | chr1 | 930053 | 930053 | G > A | Increasing of enhancer |
| | | | | | activity |
| ATAD3B | chr1 | 930797 | 930797 | G > C | Increasing of enhancer |
| | | | | | activity |
| ATAD3B | chr1 | 931772 | 931772 | G > A | Increasing of enhancer |
| | | | | | activity |
| ATM | chr11 | 107880536 | 107880536 | C > G | Change of HOXC5 binding |
| ATM | chr11 | 108211845 | 108211845 | C > G | Change of ZNF263 binding |
| ATM | chr11 | 108211845 | 108211845 | C > G | Change of ZNF519 binding |
| ATM | chr11 | 108211845 | 108211845 | C > G | Change of ZNF658B binding |
| ATM | chr11 | 109962688 | 109962688 | G > T | Change of ZXDL binding |
| ATP7IP | chr12 | 14410634 | 14410634 | C > T | Decreasing of enhancer |
| | | | | | activity |
| BATF | chr14 | 76005557 | 76005557 | T > C | |
| BCAS3, TBX2, | chr17 | 59456589 | 59456589 | C > C | Increasing of enhancer |
| TBX4 | | | | | activity |
| BCL11A | chr2 | 60718043 | 60718043 | G > T | |
| BCL11A | chr2 | 60718043 | 60718043 | G > T | Loss of GATAl motif; |
| | | | | | Decreasing of enhancer |
| | | | | | activity |
| BCL11A | chr2 | 60725451 | 60725451 | | |
| BCL2, PYGO1 | chr15 | 54197663 | 54203357 | Deletion | Loss of enhancer |
| BCL2, PYGO1 | chr15 | 54197663 | 54203357 | Deletion | Loss of enhancer |
| BCL6 | NA | NA | NA | NA | Gain of enhancer |
| BCL6 | NA | NA | NA | Duplication | Gain of enhancer |
| BCL6 | NA | NA | NA | NA | Gain of enhancer |
| BCL6 | chr3 | 187779884 | 187823100 | Duplication | Gain of enhancer |
| BCL6 | chr3 | 187779884 | 187823100 | Duplication | Gain of enhancer |
| BCL6 | chr3 | 187779884 | 187823100 | Duplication | Gain of enhancer |
| BCL6 | chr3 | 187779884 | 187823100 | Duplication | Gain of enhancer |
| BCL6 | chr3 | 187779884 | 187823100 | Duplication | Gain of enhancer |
| BCL6 | chr3 | 187779884 | 187823100 | Duplication | Gain of enhancer |
| BCL6 | chr3 | 187779884 | 187823100 | Duplication | Gain of enhancer |
| BCL6 | chr3 | 187779884 | 187823100 | Duplication | Gain of enhancer |
| BCL6 | chr3 | 187779884 | 187823100 | Duplication | Gain of enhancer |
| BCL6 | chr3 | 187779884 | 187823100 | Duplication | Gain of enhancer |
| BCL6 | chr3 | 187779884 | 187823100 | Duplication | Gain of enhancer |
| BCL6 | chr3 | 187779884 | 187823100 | Duplication | Gain of enhancer |
| BCL6 | chr3 | 187779884 | 187823100 | Duplication | Gain of enhancer |
| BCL6 | chr3 | 187779884 | 187823100 | Duplication | Gain of enhancer |
| BCL6 | chr3 | 187779884 | 187823100 | Duplication | Gain of enhancer |
| BCL6 | chr3 | 187779884 | 187823100 | Duplication | Gain of enhancer |
| BHLHE41 | chr12 | 26472562 | 26472562 | G > A | Gain of AP-1 motif; Gain of |
| | | | | | enhancer activity |
| BMF | chr15 | 40397936 | 40397936 | C > A | Loss of RELA motif; |
| | | | | | Decreasing of enhancer |
| | | | | | activity |
| BMP2 | chr20 | 7106289 | 7106289 | T > C | Increasing of enhancer |
| | | | | | activity |
| BMP4 | chr14 | 54410919 | 54410919 | T > C | Increasing of enhancer |
| | | | | | activity |
| BRAF | chr7 | 139695303 | 139695303 | G > A | Change of EGR1 binding |
| BRAF | chr7 | 139695303 | 139695303 | G > A | Change of ZNF791 binding |
| BRAF | chr7 | 140845142 | 140845142 | C > A | Change of ZNF236 binding |
| BRAP, | chr12 | 112007756 | 112007756 | C > C | Increasing of enhancer |
| ACAD10, | | | | | activity |
| ATXN2, | | | | | |
| C12orf47, | | | | | |
| ERP29, | | | | | |
| ALDH2, | | | | | |
| MAPKAPK5, | | | | | |
| FAM109A, | | | | | |
| SH2B3, | | | | | |
| TRAFD1 | | | | | |
| BRCA1 | chr17 | 41278377 | 41278377 | G > A | Gain of GMEB1; CEBPE |
| | | | | | binding; Increasing of |
| | | | | | enhancer activity |
| BRCA1 | chr17 | 41445837 | 41445837 | C > G | Change of HINFP binding |
| BRCA1 | chr17 | 41445837 | 41445837 | C > G | Change of YYl binding |
| BRCA2 | chr13 | 32895005 | 32895005 | T > A | Change of ZNF551 binding |
| BRCA2 | chr13 | 33213838 | 33213838 | G > T | Change of CTCF binding |
| BRCA2 | chr13 | 33213838 | 33213838 | G > T | Change of RAD21 binding |
| BRCA2 | chr13 | 33213838 | 33213838 | G > T | Change of SMC3 binding |
| BRCA2 | chr13 | 33213838 | 33213838 | G > T | Change of TAL2 binding |
| BRCA2 | chr13 | 33213838 | 33213838 | G > T | Change of ZNF257 binding |
| BRCA2 | chr13 | 33213838 | 33213838 | G > T | Change of ZNF430 binding |
| BRIP1 | chr17 | 59366414 | 59366414 | C > T | Change of ZNF513 binding |
| BRIP1 | chr17 | 59366414 | 59366414 | C > T | Change of ZNF517 binding |
| BRIP1 | chr17 | 59366943 | 59366943 | A > C | Change of ZNF404 binding |
| BRIP1 | chr17 | 59376306 | 59376306 | C > G | Change of NKX2-4 binding |
| BRIP1 | chr17 | 59376306 | 59376306 | C > G | Change of PBX3 binding |
| BRIP1 | chr17 | 59376306 | 59376306 | C > G | Change of POLR3A binding |
| BRIP1 | chr17 | 59377191 | 59377191 | T > C | Change of FOXB2 binding |
| BRIP1 | chr17 | 59377191 | 59377191 | T > C | Change of NANC > G binding |
| BRIP1 | chr17 | 59377191 | 59377191 | T > C | Change of SOX9 binding |
| BRIP1 | chr17 | 59525138 | 59525138 | G > T | Change of HES4 binding |
| BRIP1 | chr17 | 59525138 | 59525138 | G > T | Change of ZNF627 binding |
| BRIP1 | chr17 | 59715852 | 59715852 | G > C | Change of CEBPA binding |
| BRIP1 | chr17 | 59722479 | 59722479 | T > C | Change of HDAC2 binding |
| BRIP1 | chr17 | 59722479 | 59722479 | T > C | Change of HOXC5 binding |
| BRIP1 | chr17 | 59722479 | 59722479 | T > C | Change of ZNF263 binding |
| BRIP1 | chr17 | 59722480 | 59722480 | C > T | Change of HDAC2 binding |
| BRIP1 | chr17 | 59722480 | 59722480 | C > T | Change of HOXC5 binding |
| BRIP1 | chr17 | 59722480 | 59722480 | C > T | Change of ZNF263 binding |
| BRIP1 | chr17 | 59789086 | 59789086 | A > C | Change of ZNF425 binding |
| BRIP1 | chr20 | 55684882 | 55684882 | G > C | Change of CT53 binding |
| BRIP1 | chr20 | 55684882 | 55684882 | G > C | Change of KLF15 binding |
| BRIP1 | chr20 | 55684882 | 55684882 | G > C | Change of TFAP2A binding |
| BRIP1 | chr20 | 55684882 | 55684882 | G > C | Change of TFAP2E binding |
| BRIP1 | chr20 | 55684882 | 55684882 | G > C | Change of ZNF219 binding |
| BRIP1 | chr20 | 55684882 | 55684882 | G > C | Change of ZNF263 binding |
| BRIP1 | chr20 | 55684882 | 55684882 | G > C | Change of ZNF281 binding |
| BRIP1 | chr20 | 55684882 | 55684882 | G > C | Change of ZNF284 binding |
| BRIP1 | chr20 | 55684882 | 55684882 | G > C | Change of ZNF716 binding |
| BRIP1 | chr20 | 55701207 | 55701207 | C > T | Change of HDAC2 binding |
| BRIP1 | chr20 | 55701207 | 55701207 | C > T | Change of IRF4 binding |
| BRIP1 | chr20 | 55702731 | 55702731 | G > T | Change of PBX4 binding |
| BRIP1 | chr20 | 55774343 | 55774343 | C > G | Change of THAP1 binding |
| BRIP1 | chr20 | 55774343 | 55774343 | C > G | Change of YYl binding |
| BRIP1 | chr20 | 55795637 | 55795637 | G > A | Change of BCL6 binding |
| BRIP1 | chr20 | 55829393 | 55829393 | C > G | Change of HOXB2 binding |
| BRIP1 | chr20 | 55829393 | 55829393 | C > G | Change of HOXB3 binding |
| BRIP1 | chr20 | 55829393 | 55829393 | C > G | Change of ZNF605 binding |
| BTD | | NA | NA | | Gain of enhancer |
| BTD | | NA | NA | | Gain of enhancer |
| BTD | | NA | NA | | Gain of enhancer |
| BTD | | NA | NA | | Gain of enhancer |
| BTD | | NA | NA | | Gain of enhancer |
| BTD | | NA | NA | | Gain of enhancer |
| BTD | | NA | NA | | Gain of enhancer |
| BTD | | NA | NA | | Gain of enhancer |
| BTD | | NA | NA | | Gain of enhancer |
| BTD | | NA | NA | | Gain of enhancer |
| BTD | | NA | NA | | Gain of enhancer |
| BTD | | NA | NA | | Gain of enhancer |
| BTD | | NA | NA | | Gain of enhancer |
| BTN3A2 | chr6 | 28234597 | 28234597 | C > T | Decreasing of enhancer |
| | | | | | activity |
| BTN3A2 | chr6 | 28235176 | 28235176 | A > C | Decreasing of enhancer |
| | | | | | activity |
| C10orf110, | chr10 | 1156165 | 1156165 | T > T | Increasing of enhancer |
| WDR37, IDI2, | | | | | activity |
| PITRM1, | | | | | |
| GTPBP4, | | | | | |
| LARP4B, | | | | | |
| IDI1, PFKP | | | | | |
| C13orf34, | chr13 | 72347696 | 72347696 | A > A | Increasing of enhancer |
| DACH1 | | | | | activity |
| C16orf93 | chr16 | 30669784 | 30669784 | G > C | Change of SP3 binding |
| C16orf93 | chr16 | 30753142 | 30753142 | C > T | Change of SP1 binding |
| C16orf93 | chr16 | 30753142 | 30753142 | C > T | Change of SP3 binding |
| C16orf93 | chr16 | 31153547 | 31153547 | A > C | Change of SP1 binding |
| C16orf93 | chr16 | 31153547 | 31153547 | A > C | Change of SP3 binding |
| C16orf93 | chr16 | 31153547 | 31153547 | A > C | Change of SP1 binding |
| C16orf93 | chr16 | 31153547 | 31153547 | A > C | Change of SP3 binding |
| C16orf93, | chr16 | 30935409 | 30935409 | C > G | Change of SP1 binding |
| PHKG2 | | | | | |
| C16orf93, | chr16 | 30669784 | 30669784 | G > C | Change of SP1 binding |
| SRCAP | | | | | |
| C16orf93, | chr16 | 30669878 | 30669878 | C > T | Change of SP1 binding |
| SRCAP | | | | | |
| C16orf93, | chr16 | 30669784 | 30669784 | G > C | Change of SP1 binding |
| SRCAP, | | | | | |
| PHKG2 | | | | | |
| C16orf93, | chr16 | 30753142 | 30753142 | C > T | Change of SP1 binding |
| SRCAP, | | | | | |
| PHKG2 | | | | | |
| C16orf93, | chr16 | 31153547 | 31153547 | A > C | Change of SP1 binding |
| SRCAP, | | | | | |
| PHKG2 | | | | | |
| C19orf40, | chr19 | 33356891 | 33356891 | T > C | Increasing of enhancer |
| SLC7A10, | | | | | activity |
| CEBPG, | | | | | |
| GPATCH1, | | | | | |
| TDRD12, | | | | | |
| SLC7A9, | | | | | |
| ANKRD27, | | | | | |
| NUDT19, | | | | | |
| CCDC123, | | | | | |
| PDCD5 | | | | | |
| C2orf43 | chr2 | 20882056 | 20882056 | | |
| C5orf35 | chr5 | 56034207 | 56034207 | A > G | |
| CACNA1C | chr12 | 2346830 | 2346830 | T > A | Decreasing of enhancer |
| | | | | | activity |
| CACNA1C | chr12 | 2346393 | 2346393 | C > T | Decreasing of enhancer |
| | | | | | activity |
| CACNA1C | chr12 | 2349584 | 2349584 | G > C | Decreasing of enhancer |
| | | | | | activity |
| CACNA1C | chr12 | 2361460 | 2361460 | C > T | Decreasing of enhancer |
| | | | | | activity |
| CACNA1C | chr12 | 2349584 | 2349584 | G > C | Decreasing of enhancer |
| | | | | | activity |
| CALR | chr19 | 13049218 | 13049218 | C > T | |
| CALR | chr19 | 13049375 | 13049375 | G > C | Gain of GMEB1 binding; |
| | | | | | Increasing of enhancer |
| | | | | | activity |
| CAMK1D, | chr10 | 12307894 | 12307894 | C > T | |
| CDC123 | | | | | |
| CAMK1D, | chr10 | 12307894 | 12307894 | C > T | Gain of FOXA1 and FOXA2 |
| CDC123 | | | | | binding; Gain of enhancer |
| | | | | | activity |
| CAPG | chr2 | 85769711 | 85769711 | | |
| CAPG | chr2 | 85780536 | 85780536 | | |
| CAPG | chr2 | 85762209 | 85762209 | | Change of CTCF binding |
| CARLo-5, | chr8 | 128413305 | 128413305 | T > G | Increasing of enhancer |
| MYC | | | | | activity |
| CARLo-5, | chr8 | 128413305 | 128413305 | G > T | Increasing of enhancer |
| MYC | | | | | activity |
| CARLo-5, | chr8 | 128413305 | 128413305 | T > G | Increasing of enhancer |
| MYC | | | | | activity |
| CARLo-5, | chr8 | 128413305 | 128413305 | G > T | Increasing of enhancer |
| MYC | | | | | activity |
| CASP3 | chr4 | 185569801 | 185569801 | T > G | Decreasing of enhancer |
| | | | | | activity |
| CASP8 | chr2 | 202313604 | 202313604 | G > T | Change of MEF2A binding |
| CASP8 | chr2 | 202313604 | 202313604 | G > T | Change of MEF2C binding |
| CASP8 | chr2 | 202900229 | 202900229 | C > A | Change of SP2 binding |
| CASP8 | chr2 | 202204741 | 202204741 | C > T | Loss of MYC binding; Loss of |
| | | | | | enhancer activity |
| CBX7 | chr22 | 39542292 | 39542292 | G > A | Decreasing of enhancer |
| | | | | | activity |
| CBX7 | chr22 | 39542292 | 39542292 | G > A | Loss of ETS1; ETV4 and PAX6 |
| | | | | | motif; Decreasing of |
| | | | | | enhancer activity |
| CCDC142, | chr2 | 73868328 | 73868328 | A > G | Increasing of enhancer |
| SLC4A5, | | | | | activity |
| CCT7, | | | | | |
| STAM BP, | | | | | |
| FBX041, | | | | | |
| ACTG2, | | | | | |
| NAT8B, | | | | | |
| DUSP11, | | | | | |
| NAT8, | | | | | |
| ALMS1, | | | | | |
| TPRKB, | | | | | |
| DGUOK, | | | | | |
| TET3, BOLA3, | | | | | |
| DCTN1, | | | | | |
| TTC31, | | | | | |
| MOBKL1B | | | | | |
| CCL2 | chr17 | 32579788 | 32579788 | A > G | Gain of MSC; MYF6; PKNOX2; |
| | | | | | TGIF2LX; MEIS3; TCF21; |
| | | | | | SMAD4; TGIF1; ATOH1; |
| | | | | | MEIS2; MYOD1; MYC > G; |
| | | | | | PKNOX1; MEIS1 binding; |
| | | | | | Increasing of enhancer |
| | | | | | activity |
| CCL5 | chr17 | 34207780 | 34207780 | C > T | Gain of GATA2 binding; |
| | | | | | Increasing of enhancer |
| | | | | | activity |
| CCND1 | chr11 | 68859692 | 68859692 | G > C | Change of ZNF585B binding |
| CCND1 | chr11 | 68872778 | 68872778 | C > T | Change of HAND2 binding |
| CCND1 | chr11 | 68872778 | 68872778 | C > T | Change of USF1 binding |
| CCND1 | chr11 | 68872778 | 68872778 | C > T | Change of USF2 binding |
| CCND1 | chr11 | 68872949 | 68872949 | C > T | Change of THAP1 binding |
| CCND1 | chr11 | 68872949 | 68872949 | C > T | Change of ZNF254 binding |
| CCND1 | chr11 | 68872949 | 68872949 | C > T | Change of ZNF306 binding |
| CCND1 | chr11 | 68872949 | 68872949 | C > T | Change of ZNF502 binding |
| CCND1 | chr11 | 68881643 | 68881643 | G > T | Change of IRX3 binding |
| CCND1 | chr11 | 68886052 | 68886052 | G > T | Change of ZNF552 binding |
| CCND1 | chr11 | 69051978 | 69051978 | C > G | Change of ZNF585B binding |
| CCND1 | chr11 | 69053154 | 69053154 | G > A | Change of ZNF829 binding |
| CCND1 | chr11 | 69088100 | 69088100 | G > C | Change of HZF12 binding |
| CCND1 | chr11 | 69088100 | 69088100 | G > C | Change of ZNF143 binding |
| CCND1 | chr11 | 69088100 | 69088100 | G > C | Change of ZNF521 binding |
| CCND1 | chr11 | 69191851 | 69191851 | A > C | Change of CREB1 binding |
| CCND1 | chr11 | 69191851 | 69191851 | A > C | Change of KLF14 binding |
| CCND1 | chr11 | 69191851 | 69191851 | A > C | Change of KLF16 binding |
| CCND1 | chr11 | 69191851 | 69191851 | A > C | Change of SP3 binding |
| CCND1 | chr11 | 69191851 | 69191851 | A > C | Change of SP8 binding |
| CCND1 | chr11 | 69243913 | 69243913 | C > T | Change of ZNF454 binding |
| CCND1 | chr11 | 69252451 | 69252451 | G > A | Change of ZNF281 binding |
| CCND1 | chr11 | 69256005 | 69256005 | A > T | Change of HDAC2 binding |
| CCND1 | chr11 | 69256005 | 69256005 | A > T | Change of IRF1 binding |
| CCND1 | chr11 | 69256008 | 69256008 | C > T | Change of IRF1 binding |
| CCND1 | chr11 | 69256008 | 69256008 | C > T | Change of ZNF136 binding |
| CCND1 | chr11 | 69256011 | 69256011 | T > C | Change of IRF1 binding |
| CCND1 | chr11 | 69256011 | 69256011 | T > C | Change of ZNF136 binding |
| CCND1 | chr11 | 69258373 | 69258373 | A > C | Change of CCNT2 binding |
| CCND1 | chr11 | 69258373 | 69258373 | A > C | Change of GATA2 binding |
| CCND1 | chr11 | 69258373 | 69258373 | A > C | Change of SP1 binding |
| CCND1 | chr11 | 69258373 | 69258373 | A > C | Change of SP4 binding |
| CCND1 | chr11 | 69259344 | 69259344 | C > G | Change of CTCF binding |
| CCND1 | chr11 | 69259344 | 69259344 | C > G | Change of RAD21 binding |
| CCND1 | chr11 | 69259344 | 69259344 | C > G | Change of RXRA binding |
| CCND1 | chr11 | 69259344 | 69259344 | C > G | Change of SMC3 binding |
| CCND1 | chr11 | 69279835 | 69279835 | G > C | Change of ZNF394 binding |
| CCND1 | chr11 | 69279835 | 69279835 | G > C | Change of ZNF396 binding |
| CCND1 | chr11 | 69279835 | 69279835 | G > C | Change of ZNF492 binding |
| CCND1 | chr11 | 69279835 | 69279835 | G > C | Change of ZNF729 binding |
| CCND1 | chr11 | 69279835 | 69279835 | G > C | Change of ZNF99 binding |
| CCND1 | chr11 | 69282363 | 69282363 | C > G | Change of NFAT5 binding |
| CCND1 | chr11 | 69282363 | 69282363 | C > G | Change of NFKB1 binding |
| CCND1 | chr11 | 69282363 | 69282363 | C > G | Change of RELA binding |
| CCND1 | chr11 | 69282363 | 69282363 | C > G | Change of REL binding |
| CCND1 | chr11 | 69282363 | 69282363 | C > G | Change of SALL1 binding |
| CCND1 | chr11 | 69282363 | 69282363 | C > G | Change of STAT1 binding |
| CCND1 | chr11 | 69282363 | 69282363 | C > G | Change of ZNF227 binding |
| CCND1 | chr11 | 69282363 | 69282363 | C > G | Change of ZNF383 binding |
| CCND1 | chr11 | 69282964 | 69282964 | C > G | Change of ZNF776 binding |
| CCND1 | chr11 | 69283489 | 69283489 | C > G | Change of ZNF543 binding |
| CCND1 | chr11 | 69283489 | 69283489 | C > G | Change of ZNF708 binding |
| CCND1 | chr11 | 69287640 | 69287640 | C > T | Change of REST binding |
| CCND1 | chr11 | 69287640 | 69287640 | C > T | Change of TCF12 binding |
| CCND1 | chr11 | 69305144 | 69305144 | C > G | Change of ZNF573 binding |
| CCND1 | chr11 | 69305799 | 69305799 | T > C | Change of NANC > G binding |
| CCND1 | chr11 | 69312746 | 69312746 | T > G | Change of RREB1 binding |
| CCND1 | chr11 | 69312746 | 69312746 | T > G | Change of SP3 binding |
| CCND1 | chr11 | 69312746 | 69312746 | T > G | Change of ZNF658B binding |
| CCND1 | chr11 | 69312746 | 69312746 | T > G | Change of ZNF658 binding |
| CCND1 | chr11 | 69312746 | 69312746 | T > G | Change of ZNF781 binding |
| CCND1 | chr11 | 69315935 | 69315935 | G > T | Change of E2F6 binding |
| CCND1 | chr11 | 69315935 | 69315935 | G > T | Change of MAZ binding |
| CCND1 | chr11 | 69315935 | 69315935 | G > T | Change of ZNF143 binding |
| CCND1 | chr11 | 69315935 | 69315935 | G > T | Change of ZNF263 binding |
| CCND1 | chr11 | 69315935 | 69315935 | G > T | Change of ZNF391 binding |
| CCND1 | chr11 | 69317977 | 69317977 | G > C | Change of RLF binding |
| CCND1 | chr11 | 69317977 | 69317977 | G > C | Change of ZNF514 binding |
| CCND1 | chr11 | 69318175 | 69318175 | G > C | Change of ZNF394 binding |
| CCND1 | chr11 | 69318175 | 69318175 | G > C | Change of ZNF396 binding |
| CCND1 | chr11 | 69324989 | 69324989 | C > T | Change of ARNT2 binding |
| CCND1 | chr11 | 69324989 | 69324989 | C > T | Change of EGR1 binding |
| CCND1 | chr11 | 69324989 | 69324989 | C > T | Change of PLAG1 binding |
| CCND1 | chr11 | 69324989 | 69324989 | C > T | Change of SP1 binding |
| CCND1 | chr11 | 69324989 | 69324989 | C > T | Change of ZNF780A binding |
| CCND1 | chr11 | 69330742 | 69330742 | T > G | Change of BARHL1 binding |
| CCND1 | chr11 | 69330742 | 69330742 | T > G | Change of GSX2 binding |
| CCND1 | chr11 | 69330742 | 69330742 | T > G | Change of HOXA13 binding |
| CCND1 | chr11 | 69330742 | 69330742 | T > G | Change of TLX3 binding |
| CCND1 | chr11 | 69332416 | 69332416 | C > T | Change of ZNF69 binding |
| CCND1 | chr11 | 69331642 | 69331642 | C > G | Loss of ELK4 motif; |
| | | | | | Decreasing of enhancer |
| | | | | | activity |
| CCND1 | chr11 | 69331418 | 69331418 | C > T | Loss of USF1 motif and USF2 |
| | | | | | motif; Decreasing of |
| | | | | | enhancer activity |
| CCND1 | chr11 | 69345852 | 69345852 | G > T | Change of MAZ binding |
| CCND1 | chr11 | 69345852 | 69345852 | G > T | Change of ZNF263 binding |
| CCND1 | chr11 | 69345852 | 69345852 | G > T | Change of ZNF513 binding |
| CCND1 | chr11 | 69351959 | 69351959 | C > G | Change of ZBTB41 binding |
| CCND1 | chr11 | 69355586 | 69355586 | A > C | Change of CTCFL binding |
| CCND1 | chr11 | 69355586 | 69355586 | A > C | Change of GLI1 binding |
| CCND1 | chr11 | 69355586 | 69355586 | A > C | Change of GLI3 binding |
| CCND1 | chr11 | 69390451 | 69390451 | T > A | Change of ATF5 binding |
| CCND1 | chr11 | 69390451 | 69390451 | T > A | Change of IRF4 binding |
| CCND1 | chr11 | 69390451 | 69390451 | T > A | Change of PRDM1 binding |
| CCND1 | chr11 | 69390451 | 69390451 | T > A | Change of ZNF227 binding |
| CCND1 | chr11 | 69390451 | 69390451 | T > A | Change of ZNF263 binding |
| CCND1 | chr11 | 69390451 | 69390451 | T > A | Change of ZNF293 binding |
| CCND1 | chr11 | 69416853 | 69416853 | T > A | Change of PLAG1 binding |
| CCND1 | chr11 | 69418111 | 69418111 | G > C | Change of ZNF320 binding |
| CCND1 | chr11 | 69418111 | 69418111 | G > C | Change of ZNF502 binding |
| CCND1 | chr11 | 69431690 | 69431690 | G > A | Change of ZNF799 binding |
| CCND1 | chr11 | 69465198 | 69465198 | A > T | Change of ZNF836 binding |
| CCND1 | chr11 | 69239741 | 69239741 | G > A | Loss of HIF motif; Decreasing |
| | | | | | of enhancer activity |
| CCND1 | chr11 | 69251982 | 69251982 | C > T | Loss of HIF motif; Decreasing |
| | | | | | of enhancer activity |
| CCND1 | chr11 | 69234620 | 69234620 | T > C | Loss of HIF motif; Decreasing |
| | | | | | of enhancer activity |
| CCNE1 | chr19 | 30296853 | 30296853 | T > C | Gain of KLF5 binding; Gain of |
| | | | | | enhancer |
| CCN1, | chr4 | 77368847 | 77368847 | G > A | Increasing of enhancer |
| NUP54, | | | | | activity |
| STBD1, | | | | | |
| SDAD1, | | | | | |
| CXCL10, | | | | | |
| CCNG2, | | | | | |
| SCARB2, | | | | | |
| SHROOM3, | | | | | |
| CXCL9 | | | | | |
| CCN1, | chr4 | 77412140 | 77412140 | G > A | Increasing of enhancer |
| SCARB2, | | | | | activity |
| STBD1, | | | | | |
| CCNG2, | | | | | |
| NUP54, | | | | | |
| SHROOM3, | | | | | |
| CXCL10, | | | | | |
| SDAD1, | | | | | |
| CXCL9 | | | | | |
| CCR5 | chr3 | 46410171 | 46410171 | C > T | Loss of CREB1 motif; |
| | | | | | Decreasing of enhancer |
| | | | | | activity |
| CD207 | chr2 | 71079245 | 71079245 | C > A | Loss of Ik-2 and SIX5 motif |
| CD40 | chr20 | 44740196 | 44740196 | T > C | Decreasing of enhancer |
| | | | | | activity |
| CD40 | chr20 | 44740196 | 44740196 | T > C | Decreasing of enhancer |
| | | | | | activity |
| CD40 | chr20 | 44740196 | 44740196 | T > C | Decreasing of enhancer |
| | | | | | activity |
| CD40 | chr20 | 44740196 | 44740196 | T > C | Decreasing of enhancer |
| | | | | | activity |
| CD40 | chr20 | 44740196 | 44740196 | T > C | Decreasing of enhancer |
| | | | | | activity |
| CD40 | chr20 | 44740196 | 44740196 | T > C | Decreasing of enhancer |
| | | | | | activity |
| CD58 | chr1 | 117100957 | 117100957 | A > G | |
| CD86 | chr3 | 121793187 | 121793187 | C > A | |
| CDCA7L | chr7 | 21938240 | 21938240 | T > G | Increasing of IRF4 binding; |
| | | | | | Increasing of enhancer |
| | | | | | activity |
| CDCA7L | chr7 | 21938240 | 21938240 | A > C | Loss of GATAl; GATA2 and |
| | | | | | GATA5 motif; Decreasing of |
| | | | | | enhancer activity |
| CDH1 | chr16 | 68738472 | 68738472 | C > T | Change of ZNF80 binding |
| CDH1 | chr16 | 68741288 | 68741288 | G > T | Change of BATF binding |
| CDH1 | chr16 | 68741288 | 68741288 | G > T | Change of FOSL1 binding |
| CDH1 | chr16 | 68741288 | 68741288 | G > T | Change of HMGN3 binding |
| CDH1 | chr16 | 68741288 | 68741288 | G > T | Change of JUNB binding |
| CDH1 | chr16 | 68741288 | 68741288 | G > T | Change of MAFA binding |
| CDH1 | chr16 | 68741288 | 68741288 | G > T | Change of MAFK binding |
| CDH1 | chr16 | 68741288 | 68741288 | G > T | Change of NFE2 binding |
| CDH1 | chr16 | 68741288 | 68741288 | G > T | Change of NR3C1 binding |
| CDH1 | chr16 | 68741288 | 68741288 | G > T | Change of SMARCC1 binding |
| CDH1 | chr16 | 68750191 | 68750191 | T > C | Change of SOX7 binding |
| CDH1 | chr16 | 68750191 | 68750191 | T > C | Change of SOX9 binding |
| CDH1 | chr16 | 68752380 | 68752380 | C > G | Change of NR2F1 binding |
| CDH1 | chr16 | 68752380 | 68752380 | C > G | Change of RARG binding |
| CDH1 | chr16 | 68823620 | 68823620 | C > T | Change of ZNF238 binding |
| CDH1 | chr16 | 68826079 | 68826079 | C > T | Change of IKZF1 binding |
| CDH1 | chr16 | 68833932 | 68833932 | T > A | Change of ARID3C binding |
| CDH1 | chr16 | 68833932 | 68833932 | T > A | Change of MEOX2 binding |
| CDKN1B | chr12 | 12876142 | 12876142 | C > T | Change of ZNF253 binding |
| CDKN1B | chr12 | 12876142 | 12876142 | C > T | Change of ZNF785 binding |
| CDKN1B | chr12 | 12957277 | 12957277 | G > T | Change of NFATC1 binding |
| CDKN2A | chr9 | 21975127 | 21975127 | C > T | Decreasing of enhancer |
| | | | | | activity |
| CDKN2A | chr9 | 22123766 | 22123766 | A > C | Gain of IRF4 motif; Increasing |
| | | | | | of enhancer activity |
| CDKN2A | chr9 | 22124472 | 22124472 | C > T | Loss of TEAD3 and TEAD4 |
| | | | | | motif; Decreasing of |
| | | | | | enhancer activity |
| CDKN2A | chr9 | 22072264 | 22072264 | A > G | Loss of GATA motif; |
| | | | | | Decreasing of enhancer |
| | | | | | activity |
| CDKN2A | chr9 | 22076795 | 22076795 | A > G | Loss of TEAD3 and TEAD4 |
| | | | | | motif; Decreasing of |
| | | | | | enhancer activity |
| CDKN2A | chr9 | 22096055 | 22096055 | A > G | Loss of PRC1 motif; |
| | | | | | Decreasing of enhancer |
| | | | | | activity |
| CDKN2A | chr9 | 22106225 | 22106225 | A > G | Loss of Smad3 motif; |
| | | | | | Decreasing of enhancer |
| | | | | | activity |
| CDKN2A | chr9 | 22106731 | 22106731 | T > A | Loss of TEAD3 and TEAD4 |
| | | | | | motif; Decreasing of |
| | | | | | enhancer activity |
| CDKN2A | chr9 | 22106271 | 22106271 | A > G | Loss of GATA motif; |
| | | | | | Decreasing of enhancer |
| | | | | | activity |
| CDKN2A | chr9 | 22119195 | 22119195 | T > C | Loss of Smad3 motif; |
| | | | | | Decreasing of enhancer |
| | | | | | activity |
| CDKN2A | chr9 | 22116220 | 22116220 | T > C | Loss of GATA motif; |
| | | | | | Decreasing of enhancer |
| | | | | | activity |
| CDKN2A | chr9 | 22094330 | 22094330 | A > G | Loss of TEAD3 and TEAD4 |
| | | | | | motif; Decreasing of |
| | | | | | enhancer activity |
| CDKN2A | chr1 | 241012779 | 241012779 | C > T | Loss of Meisl motif; |
| | | | | | Decreasing of enhancer |
| | | | | | activity |
| CDKN2A | chr9 | 22072638 | 22072638 | A > G | Gain of GATA motif; |
| | | | | | Increasing of enhancer |
| | | | | | activity |
| CDKN2A, | chr9 | 22124477 | 22124477 | A > G | Loss of STAT1 motif; |
| CDKN2B | | | | | Decreasing of enhancer |
| | | | | | activity |
| CDKN2B | chr6 | 74592063 | 74602441 | Deletion | Loss of enhancer |
| CDKN2B, | chr9 | 22124472 | 22124472 | C > T | Loss of STAT1 motif; |
| MTAP, | | | | | Decreasing of enhancer |
| CDKN2A, | | | | | activity |
| CDKN2B-AS1 | | | | | |
| CETP | chr16 | 56995796 | 56995796 | G > A | Decreasing of enhancer |
| | | | | | activity |
| CFTR | chr7 | 117256712 | 117256712 | G > A | |
| CHEK2 | chr22 | 29196386 | 29196386 | G > C | Change of SP2 binding |
| CHEK2 | chr22 | 29196386 | 29196386 | G > C | Change of TFAP4 binding |
| CHEK2 | chr22 | 29196386 | 29196386 | G > C | Change of ZNF614 binding |
| CHEK2 | chr22 | 29196404 | 29196404 | G > C | Change of EGR4 binding |
| CHEK2 | chr22 | 29205398 | 29205398 | G > T | Change of SOX1 binding |
| CHEK2 | chr22 | 29208344 | 29208344 | C > G | Change of MAFF binding |
| CHEK2 | chr22 | 29208344 | 29208344 | C > G | Change of MAFK binding |
| CHEK2 | chr22 | 29210328 | 29210328 | C > T | Change of ELF3 binding |
| CHEK2 | chr22 | 29210328 | 29210328 | C > T | Change of ZNF607 binding |
| chrNAl | chr2 | 175629600 | 175629600 | T > C | Gain of GMEB1; ZNF646; |
| | | | | | KLF3; RUNX1; HES5 binding; |
| | | | | | Decreasing of enhancer |
| | | | | | activity |
| CLEC16A | chr16 | 11448517 | 11448517 | G > A | Increasing of enhancer |
| | | | | | activity |
| CLECL1 | chr12 | 9876091 | 9876091 | G > A | |
| CLPTM1L | chr5 | 1326501 | 1326501 | T > C | Increasing of enhancer |
| | | | | | activity |
| CLPTM1L | chr5 | 1326505 | 1326505 | C > G | Increasing of enhancer |
| | | | | | activity |
| CLPTM1L | chr5 | 1326904 | 1326904 | G > C | Increasing of enhancer |
| | | | | | activity |
| CLPTM1L | chr5 | 1326908 | 1326908 | T > A | Increasing of enhancer |
| | | | | | activity |
| CLPTM1L | chr5 | 1326988 | 1326988 | A > G | Increasing of enhancer |
| | | | | | activity |
| CLPTM1L | chr5 | 1327062 | 1327062 | G > A | Increasing of enhancer |
| | | | | | activity |
| CLPTM1L | chr5 | 1327333 | 1327333 | T > G | Increasing of enhancer |
| | | | | | activity |
| CLPTM1L | chr5 | 1327445 | 1327445 | C > G | Increasing of enhancer |
| | | | | | activity |
| CLPTM1L | chr5 | 1327544 | 1327544 | T > C | Increasing of enhancer |
| | | | | | activity |
| CLPTM1L | chr5 | 1327722 | 1327722 | T > C | Increasing of enhancer |
| | | | | | activity |
| CNKSR3, | chr6 | 154986664 | 154986664 | G > G | Increasing of enhancer |
| RBM16, | | | | | activity |
| TFB1M | | | | | |
| CUX1 | chr7 | 101930034 | 101930034 | G > C | Change of SP3 binding |
| CUX1 | chr7 | 101362186 | 101362186 | T > G | Change of SP3 binding |
| CUX1 | chr7 | 101362597 | 101362597 | A > T | Change of SP3 binding |
| CUX1 | chr7 | 101362186 | 101362186 | T > G | Change of SP3 binding |
| CUX1 | chr7 | 101362597 | 101362597 | A > T | Change of SP3 binding |
| CUX1 | chr7 | 101589950 | 101589950 | G > C | Change of SP3 binding |
| CXorf36 | chrx | 45298055 | 45298055 | | |
| CYBB | chrX | 37639262 | 37639262 | A > C | Decreasing of enhancer |
| | | | | | activity |
| CYBB | chrX | 37639264 | 37639264 | T > C | Decreasing of enhancer |
| | | | | | activity |
| CYBB | chrX | 37639267 | 37639267 | C > T | Decreasing of enhancer |
| | | | | | activity |
| CYP27B1 | chr12 | 58133256 | 58133256 | G > A | |
| DACH1 | chr13 | 72428647 | 72428647 | G > T | Decreasing of enhancer |
| | | | | | activity |
| DACH1 | chr13 | 72428647 | 72428647 | G > T | Decreasing of enhancer |
| | | | | | activity |
| DAPK1 | chr9 | 89725269 | 89725269 | T > C | Increasing of enhancer |
| | | | | | activity |
| DCAF7 | chr17 | 61777324 | 61777324 | A > C | Change of SP4 binding |
| DCAF7 | chr17 | 61777552 | 61777552 | G > A | Change of SP4 binding |
| DCAF7 | chr17 | 61513737 | 61513737 | C > T | Change of SP4 binding |
| DCAF7 | chr17 | 61043674 | 61043674 | C > G | Change of SP4 binding |
| DCLK3 | chr3 | 37034946 | 37034946 | G > A | Loss of TFAP4 binding; Gain |
| | | | | | of ETS family binding motif; |
| | | | | | Gain of enhancer |
| DIAPH1 | chr5 | 141014494 | 141014494 | A > G | |
| DIS3 | chr13 | 73925672 | 73925672 | TCT > ACATCTTTTC | Gain of LEF1; TCF7and |
| | | | | TTTGAGGCTTAAAT | TCF7L2 motif; Decreasing of |
| | | | | AGTATC (SEQ ID | enhancer activity |
| | | | | NO: 479) | |
| DLX6, DLX5 | chr7 | 95552064 | 96432064 | Deletion | Loss of enhancer |
| DRD5, | chr4 | 9995182 | 9995182 | G > G | Increasing of enhancer |
| WDR1, | | | | | activity |
| SLC2A9 | | | | | |
| EDN1 | chr6 | 12903957 | 12903957 | A > G | Increasing of enhancer |
| | | | | | activity |
| EDN1 | chr6 | 12903957 | 12903957 | A > G | Increasing of enhancer |
| | | | | | activity |
| EDN1 | chr6 | 12903957 | 12903957 | A > G | Increasing of enhancer |
| | | | | | activity |
| EDN1 | chr6 | 12903957 | 12903957 | A > G | Increasing of enhancer |
| | | | | | activity |
| EDN1 | chr6 | 12903957 | 12903957 | A > G | Increasing of enhancer |
| | | | | | activity |
| EGFR | chr7 | 55102219 | 55102219 | A > T | Change of NPAS3 binding |
| EGFR | chr7 | 55102219 | 55102219 | A > T | Change of RREB1 binding |
| EGFR | chr7 | 55322571 | 55322571 | C > A | Change of ZNF647 binding |
| EGFR | chr7 | 55322596 | 55322596 | G > A | Change of SP1 binding |
| EGFR | chr7 | 55322596 | 55322596 | G > A | Change of SP4 binding |
| EGFR | chr7 | 55322596 | 55322596 | G > A | Change of ZNF189 binding |
| EGFR | chr7 | 55322596 | 55322596 | G > A | Change of ZNF254 binding |
| EGFR | chr7 | 55322596 | 55322596 | G > A | Change of ZNF263 binding |
| EGFR | chr7 | 55322596 | 55322596 | G > A | Change of ZNF647 binding |
| EGLN2 | chr19 | 41365000 | 41385000 | Deletion | Loss of enhancer |
| EGR2 | chr10 | 64191785 | 64202507 | Deletion | Loss of enhancer |
| EGR2 | chr10 | 64737575 | 64737575 | T > A | Gain of EWSR1-FLI1 motif; |
| | | | | | Increasing of EWSR1-FLI1 |
| | | | | | binding; Gain of enhancer |
| ELL2 | chr5 | 95261538 | 95261538 | G > C | Decreasing of enhancer |
| | | | | | activity |
| ERAP2 | chr5 | 96273298 | 96273298 | G > A | |
| ERG | NA | NA | NA | NA | Loss of d ETS; GATA and E- |
| | | | | | BOX motif; Decreasing of |
| | | | | | enhancer activity |
| ESR1 | chr6 | 150465639 | 150465639 | C > A | Change of ZIM2 binding |
| ESR1 | chr6 | 151924498 | 151924498 | T > C | Decreasing of enhancer |
| | | | | | activity |
| ESR1 | chr6 | 151935148 | 151935148 | C > G | Change of ZNF21 binding |
| ESR1 | chr6 | 151937492 | 151937492 | G > A | Change of PAX6 binding |
| ESR1 | chr6 | 151937492 | 151937492 | G > A | Change of RARB binding |
| ESR1 | chr6 | 151937492 | 151937492 | G > A | Change of ZNF789 binding |
| ESR1 | chr6 | 151955192 | 151955192 | A > G | Decreasing of enhancer |
| | | | | | activity |
| ESR1 | chr6 | 151955219 | 151955219 | G > T | Gain of GATA3 motif; |
| | | | | | Decreasing of enhancer |
| | | | | | activity |
| ESR1 | chr6 | 151957875 | 151957875 | G > C | Change of ZNF20 binding |
| ESR1 | chr6 | 151958185 | 151958185 | G > A | Change of NKX3-1 binding |
| ESR1 | chr6 | 151958185 | 151958185 | G > A | Change of POU3F3 binding |
| ESR1 | chr6 | 151961699 | 151961699 | C > T | Change of HDAC2 binding |
| ESR1 | chr6 | 151961699 | 151961699 | C > T | Change of HOXC5 binding |
| ESR1 | chr6 | 151961699 | 151961699 | C > T | Change of ZNF263 binding |
| ESR1 | chr6 | 152024472 | 152024472 | C > G | Decreasing of enhancer |
| | | | | | activity |
| ESR1 | chr6 | 152232725 | 152232725 | G > C | Change of FOS binding |
| ESR1 | chr6 | 152232725 | 152232725 | G > C | Change of TP63 binding |
| ESR1 | chr6 | 152232725 | 152232725 | G > C | Change of TP73 binding |
| ESR1 | chr6 | 152360637 | 152360637 | T > C | Decreasing of enhancer |
| | | | | | activity |
| ESR1 | chr6 | 151953765 | 151953765 | Deletion | Loss of enhancer |
| ESR1, | chr6 | 151958815 | 151958815 | T > C | Decreasing of enhancer |
| RMND1 | | | | | activity |
| ESR1, | chr6 | 152432902 | 152432902 | T > C | Decreasing of enhancer |
| RMND1 | | | | | activity |
| ESR1, | chr6 | 151949582 | 151949582 | A > C | Decreasing of enhancer |
| RMND1, | | | | | activity |
| CCDC170 | | | | | |
| ESR1, | chr6 | 151949312 | 151949312 | G > A | Decreasing of enhancer |
| RMND1, | | | | | activity |
| CCDC170 | | | | | |
| ETS2 | chr21 | 40283733 | 40283733 | C > T | |
| ETV6 | chr12 | 11883580 | 11883580 | T > C | Change of LMO2 binding |
| ETV6 | chr12 | 11899976 | 11899976 | A > G | Change of ZBTB20 binding |
| ETV6 | chr12 | 12038275 | 12038275 | A > C | Change of SRF binding |
| ETV6 | chr12 | 12038275 | 12038275 | A > C | Change of YYl binding |
| ETV6 | chr12 | 12879708 | 12879708 | T > G | Change of POU2F1 binding |
| ETV6 | chr12 | 12009741 | 12009741 | A > G | Decreasing of MAX binding; |
| | | | | | Decreasing of enhancer |
| | | | | | activity |
| EVI1 | NA | NA | NA | inv(3)(q21q26.2) | Gain of enhancer |
| EVI1 | NA | NA | NA | t(3; 3)(q21; q26.2) | Gain of enhancer |
| EVI1 | NA | NA | NA | Inversion | Gain of enhancer |
| F7 | chr13 | 113760095 | 113760095 | T > G | Decreasing of enhancer |
| | | | | | activity |
| F7 | chr13 | 113760101 | 113760101 | C > T | Decreasing of enhancer |
| | | | | | activity |
| F8 | chrX | 154251046 | 154251046 | G > A | Decreasing of enhancer |
| | | | | | activity |
| F9 | chrX | 138612889 | 138612889 | G > A | Gain of FOXH1 binding; |
| | | | | | Decreasing of enhancer |
| | | | | | activity |
| FAM122A, | chr9 | 71434707 | 71434707 | A > A | Increasing of enhancer |
| FXN | | | | | activity |
| FAM135B | | NA | NA | | Gain of enhancer |
| FAM135B | | NA | NA | | Gain of enhancer |
| FAM135B | | NA | NA | | Gain of enhancer |
| FAM135B | | NA | NA | | Gain of enhancer |
| FAM135B | | NA | NA | | Gain of enhancer |
| FAM135B | | NA | NA | | Gain of enhancer |
| FAM135B | | NA | NA | | Gain of enhancer |
| FAM135B | | NA | NA | | Gain of enhancer |
| FAM135B | | NA | NA | | Gain of enhancer |
| FAM167A | chr8 | 11343973 | 11343973 | C > T | Increasing of enhancer |
| | | | | | activity |
| FAM167A | chr8 | 11343973 | 11343973 | C > T | Increasing of enhancer |
| | | | | | activity |
| FAM167A | chr8 | 11343973 | 11343973 | C > T | Increasing of enhancer |
| | | | | | activity |
| FAM167A | chr8 | 11343973 | 11343973 | C > T | Increasing of enhancer |
| | | | | | activity |
| FAM167A | chr8 | 11343973 | 11343973 | C > T | Increasing of enhancer |
| | | | | | activity |
| FAM167A | chr8 | 11343973 | 11343973 | C > T | Increasing of enhancer |
| | | | | | activity |
| FAM84B | chr8 | 127888731 | 127888731 | | |
| FGER2 | chr10 | 123333997 | 123333997 | C > T | Gain of C/EBPbeta motif; |
| | | | | | Increasing of enhancer |
| | | | | | activity |
| FGF10, | chr5 | 44706498 | 44706498 | A > G | Gain of FOXA1;OCT1 bs; Gain |
| MRPS30 | | | | | of enhancer activity |
| FGFR2 | chr10 | 123340311 | 123340311 | T > C | Gain of ER-alpha binding; |
| | | | | | Gain of FOXA1 binding; |
| | | | | | Increasing of enhancer |
| | | | | | activity |
| FGFR2 | chr10 | 123340311 | 123340311 | T > C | Gain of FOXA1 binding; Gain |
| | | | | | of enhancer |
| FGFR2 | chr10 | 123340311 | 123340311 | C > T | Gain of Oct-1/Runx2 motif; |
| | | | | | Increasing of enhancer |
| | | | | | activity |
| FGFR2 | chr10 | 123340432 | 123340432 | - > C | Gain of E2F1 binding; Gain of |
| | | | | | enhancer |
| FGFR2 | chr10 | 123340432 | 123340432 | - > C | Gain of E2F1 binding; |
| | | | | | Increasing of enhancer |
| | | | | | activity |
| FGFR2 | chr10 | 123349324 | 123349324 | T > A | Gain of GATA3 binding; Gain |
| | | | | | of enhancer |
| FGFR3 | chr4 | 1770844 | 1770844 | C > G | Change of MAZ binding |
| FGFR3 | chr4 | 1770844 | 1770844 | C > G | Change of SP4 binding |
| FGFR3 | chr4 | 1771286 | 1771286 | C > T | Change of SP4 binding |
| FGFR3 | chr4 | 1772212 | 1772212 | T > G | Change of SP4 binding |
| FGFR3 | chr4 | 1773418 | 1773418 | A > C | Change of MAZ binding |
| FGFR3 | chr4 | 1773418 | 1773418 | A > C | Change of SP4 binding |
| FGFR3 | chr4 | 1762678 | 1762678 | C > T | Change of MAZ binding |
| FGFR3 | chr4 | 1762678 | 1762678 | C > T | Change of SP4 binding |
| FGFR3 | chr4 | 1805959 | 1805959 | C > G | Change of MAZ binding |
| FN1 | chr2 | 216532560 | 216532560 | G > T | Increasing of enhancer |
| | | | | | activity |
| FN1 | chr2 | 216532635 | 216532635 | G > A | Increasing of enhancer |
| | | | | | activity |
| FN1 | chr2 | 216532985 | 216532985 | A > T | Increasing of enhancer |
| | | | | | activity |
| FN1 | chr2 | 216533394 | 216533394 | G > A | Increasing of enhancer |
| | | | | | activity |
| FOXA1 | chr14 | 37710185 | 37710185 | A > C | Change of ZNF611 binding |
| FOXA1 | chr14 | 37710806 | 37710806 | T > G | Change of CTCFL binding |
| FOXA1 | chr14 | 37710806 | 37710806 | T > G | Change of EGR1 binding |
| FOXA1 | chr14 | 37710806 | 37710806 | T > G | Change of EGR3 binding |
| FOXA1 | chr14 | 37710806 | 37710806 | T > G | Change of EGR4 binding |
| FOXA1 | chr14 | 37710806 | 37710806 | T > G | Change of GIC > T1 binding |
| FOXA1 | chr14 | 37710806 | 37710806 | T > G | Change of KLF15 binding |
| FOXA1 | chr14 | 37710806 | 37710806 | T > G | Change of MAZ binding |
| FOXA1 | chr14 | 37710806 | 37710806 | T > G | Change of NPAS3 binding |
| FOXA1 | chr14 | 37710806 | 37710806 | T > G | Change of RREB1 binding |
| FOXA1 | chr14 | 37710806 | 37710806 | T > G | Change of SP1 binding |
| FOXA1 | chr14 | 37710806 | 37710806 | T > G | Change of SP3 binding |
| FOXA1 | chr14 | 37710806 | 37710806 | T > G | Change of SP4 binding |
| FOXA1 | chr14 | 37710806 | 37710806 | T > G | Change of ZBTB7B binding |
| FOXA1 | chr14 | 37710806 | 37710806 | T > G | Change of ZNF100 binding |
| FOXA1 | chr14 | 37710806 | 37710806 | T > G | Change of ZNF219 binding |
| FOXA1 | chr14 | 37710806 | 37710806 | T > G | Change of ZNF436 binding |
| FOXA1 | chr14 | 37710806 | 37710806 | T > G | Change of ZNF485 binding |
| FOXA1 | chr14 | 37710806 | 37710806 | T > G | Change of ZNF658B binding |
| FOXA1 | chr14 | 37723745 | 37723745 | C > T | Change of EGR4 binding |
| FOXA1 | chr14 | 37723745 | 37723745 | C > T | Change of ZBTB41 binding |
| FOXA1 | chr14 | 37723745 | 37723745 | C > T | Change of ZNF148 binding |
| FOXA1 | chr14 | 37733220 | 37733220 | G > A | Change of MEF2A binding |
| FOXA1 | chr14 | 38058268 | 38058268 | C > G | Change of MECOM binding |
| FOXA1 | chr14 | 38118241 | 38118241 | C > T | Change of ZFPM1 binding |
| FOXA1 | chr14 | 38120099 | 38120099 | G > C | Change of ESR1 binding |
| FOXA1 | chr14 | 38120099 | 38120099 | G > C | Change of ESRRA binding |
| FOXA1 | chr14 | 38120099 | 38120099 | G > C | Change of ESRRB binding |
| FOXA1 | chr14 | 38120099 | 38120099 | G > C | Change of NR4A3 binding |
| FOXA1 | chr14 | 38120099 | 38120099 | G > C | Change of NR5A1 binding |
| FOXA1 | chr14 | 38120099 | 38120099 | G > C | Change of NR5A2 binding |
| FOXA1 | chr14 | 38126241 | 38126241 | C > A | Change of ZFP37 binding |
| FOXA1 | chr14 | 38164005 | 38164005 | G > C | Change of IKZF1 binding |
| FOXA1 | chr14 | 38167448 | 38167448 | C > A | Change of EVX2 binding |
| FOXA1 | chr14 | 38179158 | 38179158 | T > G | Change of HNF1A binding |
| FOXA1 | chr14 | 38182676 | 38182676 | C > T | Change of THRA binding |
| FOXA1 | chr14 | 38182684 | 38182684 | C > T | Change of ZNF226 binding |
| FOXA1 | chr14 | 38182915 | 38182915 | C > G | Change of ZNF211 binding |
| FOXA1 | chr14 | 38184293 | 38184293 | G > C | Change of NHLH2 binding |
| FOXE1 | chr9 | 100549013 | 100549013 | A > G | Gain of E-box motif; Gain of |
| | | | | | enhancer activity |
| FOXE1, | chr9 | 100556972 | 100556972 | G > A | Increasing of TFAP2A binding; |
| PTCSC2 | | | | | Increasing of enhancer |
| | | | | | activity |
| FOXE1, | chr9 | 100551768 | 100551768 | A > G | Increasing of TFAP2A binding; |
| PTCSC2 | | | | | Increasing of enhancer |
| | | | | | activity |
| FOXE1, | chr9 | 100551908 | 100551908 | A > C | Increasing of enhancer |
| PTCSC2 | | | | | activity |
| FOXE1, | chr9 | 100548934 | 100548934 | T > C | Decreasing of CEBPb binding; |
| PTCSC2 | | | | | Diseasing of enhancer activity |
| FOXE1, | chr9 | 100556109 | 100556109 | G > A | Increasing of TFAP2A binding; |
| PTCSC2 | | | | | Increasing of enhancer |
| | | | | | activity |
| FOXG1 | chr14 | 30000405 | 30000405 | G > T | Decreasing of enhancer |
| | | | | | activity |
| FOXL2 | chr3 | 138948982 | 138956382 | Deletion | Loss of enhancer |
| FOXL2 | chr3 | 138949151 | 138956509 | Deletion | Loss of enhancer |
| FOXL2 | chr3 | 138949151 | 138956509 | Deletion | Loss of enhancer |
| FOXL2 | chr3 | 138949151 | 138956509 | Deletion | Loss of enhancer |
| FOXL2 | chr3 | 138949151 | 138956509 | Deletion | Loss of enhancer |
| FOXL2 | chr3 | 138949151 | 138956509 | Deletion | Loss of enhancer |
| FOXL2 | chr3 | 138949151 | 138956509 | Deletion | Loss of enhancer |
| FOXL2 | chr3 | 138949151 | 138956509 | Deletion | Loss of enhancer |
| FOXL2 | chr3 | 138949151 | 138956509 | Deletion | Loss of enhancer |
| FOXL2 | chr3 | 140431841 | 140439199 | Deletion | Loss of enhancer |
| FOXL2 | chr3 | 140431841 | 140439199 | Deletion | Loss of enhancer |
| FOXL2 | chr3 | 140431841 | 140439199 | Deletion | Loss of enhancer |
| FOXL2 | chr3 | 140431841 | 140439199 | Deletion | Loss of enhancer |
| FOXL2 | chr3 | 140431841 | 140439199 | Deletion | Loss of enhancer |
| FOXL2 | chr3 | 140431841 | 140439199 | Deletion | Loss of enhancer |
| FOXL2 | chr3 | 140431841 | 140439199 | Deletion | Loss of enhancer |
| FOXL2 | chr3 | 140431841 | 140439199 | Deletion | Loss of enhancer |
| FRG2 | chr4 | 190959438 | 190959438 | C > T | Change of SP8 binding |
| FRG2 | chr4 | 190959439 | 190959439 | G > A | Change of SP8 binding |
| FRG2 | chr4 | 190959651 | 190959651 | G > C | Change of SP8 binding |
| FTO | chr16 | 53816275 | 53816275 | C > A | |
| FTO | chr16 | 53816752 | 53816752 | A > G | |
| FTO | chr16 | 53816838 | 53816838 | G > A | |
| GAD1 | chr2 | 171690121 | 171690121 | A > G | Decreasing of enhancer |
| | | | | | activity |
| GAD1 | chr2 | 171678379 | 171678379 | A > G | Decreasing of enhancer |
| | | | | | activity |
| GAP43 | chr3 | 115377646 | 115377646 | G > T | Decreasing of enhancer |
| | | | | | activity |
| GATA2 | NA | NA | NA | t(3; 3)(q21; q26.2) | Loss of enhancer |
| GATA2 | NA | NA | NA | inv(3)(q21q26.2) | Loss of enhancer |
| GATA2 | chr3 | 128202137 | 128202161 | | Loss of ETS motif; Decreasing |
| | | | | | of enhancer activity |
| GATA2 | chr3 | 128202154 | 128202154 | C > T | Decreasing of enhancer |
| | | | | | activity |
| GATA3 | chr10 | 6244293 | 6244293 | C > T | Change of MAZ binding |
| GATA3 | chr10 | 6244293 | 6244293 | C > T | Change of ZNF263 binding |
| GATA3 | chr10 | 7567024 | 7567024 | T > A | Change of MSX1 binding |
| GATA3 | chr10 | 7928151 | 7928151 | C > G | Change of ZNF117 binding |
| GATA3 | chr10 | 8067866 | 8067866 | G > C | Change of HOXC5 binding |
| GATA3 | chr10 | 8102520 | 8102520 | T > A | Change of STAT4 binding |
| GATA3 | chr10 | 8102598 | 8102598 | G > T | Change of ESR1 binding |
| GATA3 | chr10 | 8102598 | 8102598 | G > T | Change of SP3 binding |
| GATA3 | chr10 | 8119116 | 8119116 | T > G | Change of FOS binding |
| GATA3 | chr10 | 8374958 | 8374958 | C > T | Change of EGR1 binding |
| GATA3 | chr10 | 8374958 | 8374958 | C > T | Change of MAZ binding |
| GATA3 | chr10 | 8374958 | 8374958 | C > T | Change of PLAG1 binding |
| GATA3 | chr10 | 8374958 | 8374958 | C > T | Change of SP1 binding |
| GATA3 | chr10 | 8374958 | 8374958 | C > T | Change of SP2 binding |
| GATA3 | chr10 | 8374958 | 8374958 | C > T | Change of SP3 binding |
| GATA3 | chr10 | 8374958 | 8374958 | C > T | Change of SP4 binding |
| GATA3 | chr10 | 8374958 | 8374958 | C > T | Change of WT1 binding |
| GATA3 | chr10 | 8374958 | 8374958 | C > T | Change of ZBTB7B binding |
| GATA3 | chr10 | 8374958 | 8374958 | C > T | Change of ZNF148 binding |
| GATA3 | chr10 | 8374958 | 8374958 | C > T | Change of ZNF189 binding |
| GATA3 | chr10 | 8374958 | 8374958 | C > T | Change of ZNF263 binding |
| GATA3 | chr10 | 8374958 | 8374958 | C > T | Change of ZNF281 binding |
| GATA3 | chr10 | 8374958 | 8374958 | C > T | Change of ZNF658B binding |
| GATA3 | chr10 | 8374958 | 8374958 | C > T | Change of ZNF823 binding |
| GATA3 | chr10 | 8393839 | 8393839 | C > A | Change of FOXB2 binding |
| GATA3 | chr10 | 8393839 | 8393839 | C > A | Change of FOXP4 binding |
| GATA3 | chr10 | 8393839 | 8393839 | C > A | Change of KIAA0415 binding |
| GATA3 | chr10 | 8393839 | 8393839 | C > A | Change of ZNF227 binding |
| GATA3 | chr10 | 8402402 | 8402402 | G > A | Change of E4F1 binding |
| GATA3 | chr10 | 8405624 | 8405624 | G > A | Change of ZFP14 binding |
| GATA3 | chr10 | 8405624 | 8405624 | G > A | Change of ZIK1 binding |
| GATA3 | chr10 | 8405624 | 8405624 | G > A | Change of ZNF816A binding |
| GATA3 | chr10 | 8899177 | 8899177 | G > C | Change of TBX3 binding |
| GATA3 | chr10 | 8899177 | 8899177 | G > C | Change of ZNF670 binding |
| GATA3 | chr10 | 8899312 | 8899312 | A > T | Change of HSF1 binding |
| GATA3 | chr10 | 8899312 | 8899312 | A > T | Change of ZNF238 binding |
| GATA3 | chr10 | 8900652 | 8900652 | G > A | Change of STAT5A binding |
| GATA3 | chr10 | 8900652 | 8900652 | G > A | Change of STAT5B binding |
| GATA3 | chr10 | 8903379 | 8903379 | A > T | Change of ZNF331 binding |
| GATA3 | chr10 | 8911062 | 8911062 | C > G | Change of SP4 binding |
| GATA3 | chr10 | 9079498 | 9079498 | G > T | Change of HNF1A binding |
| GATA3 | chr10 | 9079498 | 9079498 | G > T | Change of HNF1B binding |
| GATA3 | chr10 | 9079498 | 9079498 | G > T | Change of ONECUT1 binding |
| GATA3 | chr10 | 9079498 | 9079498 | G > T | Change of ZNF300 binding |
| GATA3 | chr10 | 9112313 | 9112313 | G > C | Change of NPAS3 binding |
| GATA3 | chr10 | 9117103 | 9117103 | G > A | Change of ZNF441 binding |
| GATA3 | chr10 | 9201133 | 9201133 | C > A | Change of PRDM9 binding |
| GATA3 | chr10 | 9215998 | 9215998 | C > G | Change of POU6F2 binding |
| GATA3 | chr10 | 9343954 | 9343954 | C > G | Change of FOS binding |
| GATA3 | chr10 | 9343954 | 9343954 | C > G | Change of FOXB2 binding |
| GATA3 | chr10 | 9343954 | 9343954 | C > G | Change of PBX3 binding |
| GATAD2A | chr19 | 19434350 | 19434350 | C > T | Decreasing of enhancer |
| | | | | | activity |
| GCLM | chr1 | 94375309 | 94375309 | G > A | Decreasing of enhancer |
| | | | | | activity |
| GFI1 | NA | NA | NA | NA | Gain of enhancer |
| GFI1 | NA | NA | NA | NA | Gain of enhancer |
| GFI1 | chr1 | 93009313 | 93009313 | A > G | Increasing of enhancer |
| | | | | | activity |
| GIGYF2 | | NA | NA | | Gain of enhancer |
| GIGYF2 | | NA | NA | | Gain of enhancer |
| GIGYF2 | | NA | NA | | Gain of enhancer |
| GIGYF2 | | NA | NA | | Gain of enhancer |
| GIGYF2 | | NA | NA | | Gain of enhancer |
| GIGYF2 | | NA | NA | | Gain of enhancer |
| GIGYF2 | | NA | NA | | Gain of enhancer |
| GIGYF2 | | NA | NA | | Gain of enhancer |
| GIGYF2 | | NA | NA | | Gain of enhancer |
| GIGYF2 | | NA | NA | | Gain of enhancer |
| GIGYF2 | | NA | NA | | Gain of enhancer |
| GIGYF2 | | NA | NA | | Gain of enhancer |
| GIGYF2 | | NA | NA | | Gain of enhancer |
| GIGYF2 | | NA | NA | | Gain of enhancer |
| GIGYF2 | | NA | NA | | Gain of enhancer |
| GJB1 | chrX | 70443031 | 70443031 | G > C | Gain of GMEB1; KLF3 binding; |
| | | | | | Decreasing of enhancer |
| | | | | | activity |
| GNL3 | chr3 | 52742537 | 52742537 | A > T | Decreasing of enhancer |
| | | | | | activity |
| GREM1 | chr15 | 32993111 | 32993111 | C > T | Increasing of enhancer |
| | | | | | activity |
| GSDMC | chr8 | 129978038 | 129978038 | | |
| GSK3B | chr3 | 119814957 | 119814957 | T > A | Increasing of enhancer |
| | | | | | activity |
| H19 | chr11 | 2020124 | 2020124 | C > A | Gain of SMAD4; HEY1 binding |
| HAPLN4 | chr19 | 19431963 | 19431963 | G > T | Decreasing of enhancer |
| | | | | | activity |
| HBB | chr11 | 5248393 | 5248393 | G > A | Decreasing of enhancer |
| | | | | | activity |
| HBB | chr11 | 5248402 | 5248402 | G > A | Decreasing of enhancer |
| | | | | | activity |
| HBB | chr11 | 5248491 | 5248491 | C > T | Decreasing of enhancer |
| | | | | | activity |
| HBD | chr11 | 5255749 | 5255749 | G > T | Decreasing of enhancer |
| | | | | | activity |
| HBD | chr11 | 5255778 | 5255778 | C > T | Gain of GMEB1 binding; |
| | | | | | Decreasing of enhancer |
| | | | | | activity |
| HBG1 | chr11 | 5271262 | 5271262 | A > G | Gain of ATOH1 binding; |
| | | | | | Increasing of enhancer |
| | | | | | activity |
| HBG1 | chr11 | 5271289 | 5271289 | G > A | Increasing of enhancer |
| | | | | | activity |
| HBG2 | chr11 | 5276120 | 5276120 | C > A | Increasing of enhancer |
| | | | | | activity |
| HBG2 | chr11 | 5276172 | 5276172 | C > T | Increasing of enhancer |
| | | | | | activity |
| HBG2 | chr11 | 5276186 | 5276186 | A > G | Gain of GMEB1; KLF3; ATOH1 |
| | | | | | binding; Increasing of |
| | | | | | enhancer activity |
| HBG2 | chr11 | 5276213 | 5276213 | G > C | Increasing of enhancer |
| | | | | | activity |
| HBM | chr16 | 209709 | 209709 | T > C | Decreasing of enhancer |
| | | | | | activity |
| HERC5, PIGY, | chr4 | 88959922 | 88959922 | G > C | Increasing of enhancer |
| ABCG2, | | | | | activity |
| PPM1K, | | | | | |
| SPARCL1, | | | | | |
| HERC6, PKD2 | | | | | |
| HHIP | chr4 | 145488334 | 145488334 | T > C | Gain of Sp3 motif; Decreasing |
| | | | | | of enhancer activity |
| HHIP | chr4 | 145487934 | 145487934 | G > A | Decreasing of enhancer |
| | | | | | activity |
| HLA-DRB1, | chr6 | 31888367 | 31888367 | A > G | Decreasing of enhancer |
| HLA-C, HLA- | | | | | activity |
| DRB5, HLA- | | | | | |
| DQB1 | | | | | |
| HMBS | chr11 | 118955622 | 118955622 | T > A | Gain of GMEB1; HEY2 |
| | | | | | binding; Decreasing of |
| | | | | | enhancer activity |
| HMBS | chr11 | 118955641 | 118955641 | C > T | Gain of ESRRA; NR5A2 |
| | | | | | binding; Decreasing of |
| | | | | | enhancer activity |
| HMCN1 | chr1 | 185904001 | 185904001 | T > C | Decreasing of enhancer |
| | | | | | activity |
| HMCN1 | chr1 | 185904577 | 185904577 | C > T | Decreasing of enhancer |
| | | | | | activity |
| HNF1A | chr12 | 121416034 | 121416034 | G > C | Decreasing of enhancer |
| | | | | | activity |
| HNF1A | chr12 | 121416448 | 121416448 | G > C | Gain of WT1; EGR1 binding; |
| | | | | | Increasing of enhancer |
| | | | | | activity |
| HNF4A | chr20 | 42984276 | 42984276 | C > T | Decreasing of enhancer |
| | | | | | activity |
| HOTAIR | chr12 | 54360232 | 54360232 | C > T | Increasing of enhancer |
| | | | | | activity |
| HRH2 | chr5 | 175109219 | 175109219 | A > G | |
| HTR2A | chr13 | 47471478 | 47471478 | C > T | |
| HTR3A | chr11 | 113846006 | 113846006 | C > T | |
| HTRA1 | chr10 | 124217205 | 124217259 | | Gain of LYRIC binding; Gain of |
| | | | | | enhancer |
| ICOSLG | chr21 | 45615561 | 45615561 | A > G | Increasing of enhancer |
| | | | | | activity |
| ICOSLG | chr21 | 45615561 | 45615561 | A > G | Increasing of enhancer |
| | | | | | activity |
| ICOSLG | chr21 | 45615561 | 45615561 | A > G | Increasing of enhancer |
| | | | | | activity |
| ICOSLG | chr21 | 45615561 | 45615561 | A > G | Increasing of enhancer |
| | | | | | activity |
| ICOSLG | chr21 | 45615561 | 45615561 | A > G | Increasing of enhancer |
| | | | | | activity |
| ICOSLG | chr21 | 45615561 | 45615561 | A > G | Increasing of enhancer |
| | | | | | activity |
| ID2 | chr2 | 8450123 | 8450123 | A > G | Increasing of enhancer |
| | | | | | activity |
| IGF2BP2 | chr3 | 185514393 | 185514393 | T > C | |
| IGF2BP2 | chr3 | 185515635 | 185515635 | G > A | |
| IGF2BP2 | chr3 | 185513296 | 185513296 | T > A | |
| IGF2BP2 | chr3 | 185514931 | 185514931 | T > C | |
| IGF2BP2 | chr3 | 185513392 | 185513392 | A > G | |
| IGFBP5 | chr2 | 217909463 | 217909463 | G > A | Increasing of enhancer |
| | | | | | activity |
| IHH | chr2 | 219925238 | 219974238 | Duplication | Gain of enhancer |
| IHH | chr2 | 219925238 | 219974238 | Duplication | Gain of enhancer |
| IKZF3 | chr17 | 37912377 | 37912377 | C > T | Decreasing of enhancer |
| | | | | | activity |
| IL10 | chr1 | 206946407 | 206946407 | G > T | Decreasing of enhancer |
| | | | | | activity |
| IL10 | chr1 | 206946634 | 206946634 | A > G | Gain of NRL binding; |
| | | | | | Increasing of enhancer |
| | | | | | activity |
| IL10 | chr1 | 206946862 | 206946862 | C > T | Decreasing of enhancer |
| | | | | | activity |
| IL12B | chr5 | 158759900 | 158759900 | A > G | |
| IL-18 | chr11 | 112026156 | 112026156 | C > G | Gain of enhancer activity |
| IL-1A | chr2 | 113542960 | 113542960 | T > C | |
| IL-1B | chr2 | 113590390 | 113590390 | C > T | |
| IL2RA | chr10 | 6096036 | 6096036 | C > T | Loss of GABPA motif; |
| | | | | | Decreasing of GABPA binding; |
| | | | | | Decreasing of enhancer |
| | | | | | activity |
| IL2RA | chr10 | 6102012 | 6102012 | A > G | Increasing of ER binding; |
| | | | | | Increasing of enhancer |
| | | | | | activity |
| IL2RA | chr10 | 6093139 | 6093139 | G > A | Loss of ELF1 motif; |
| | | | | | Decreasing of ELF1 binding; |
| | | | | | Increasing of RUNX3 binding; |
| | | | | | Decreasing of enhancer |
| | | | | | activity |
| IL2RA | chr10 | 6093140 | 6093140 | C > T | Loss of ELF1 motif; |
| | | | | | Decreasing of ELF1 binding; |
| | | | | | Increasing of RUNX3 binding; |
| | | | | | Decreasing of enhancer |
| | | | | | activity |
| IL2RA | chr10 | 6100790 | 6100790 | G > A | Decreasing of EBF1 binding; |
| | | | | | Decreasing of enhancer |
| | | | | | activity |
| IL2RA | chr10 | 6099045 | 6099045 | A > G | Decreasing of TFAP4 binding; |
| | | | | | Loss of enhancer |
| IL2RA | chr10 | 6094697 | 6094697 | C > T | Decreasing of MEF2C binding; |
| | | | | | Loss of enhancer |
| IL2RA | chr10 | 6102012 | 6102012 | A > G | Gain of ER-alpha binding; |
| | | | | | Gain of enhancer |
| IL2RA | chr10 | 6101713 | 6101713 | T > C | |
| IL2RA | chr10 | 6110829 | 6110829 | C > T | |
| IL2RA | chr10 | 6094697 | 6094697 | C > T | Loss of enhancer |
| IL2RA | chr10 | 6094697 | 6094697 | C > T | Loss of enhancer |
| IL4 | chr5 | 132009154 | 132009154 | C > T | Gain of KLF3 binding; |
| | | | | | Increasing of enhancer |
| | | | | | activity |
| IL6 | chr7 | 22766542 | 22766542 | A > C | Increasing of enhancer |
| | | | | | activity |
| INS | chr11 | 2182419 | 2182419 | T > G | Decreasing of enhancer |
| | | | | | activity |
| INSC | | NA | NA | | Gain of enhancer |
| INSC | | NA | NA | | Gain of enhancer |
| INSC | | NA | NA | | Gain of enhancer |
| INSC | | NA | NA | | Gain of enhancer |
| INSC | | NA | NA | | Gain of enhancer |
| INTS1, | chr7 | 1285195 | 1285195 | A > T | Increasing of enhancer |
| MICALL2 | | | | | activity |
| IRAK3 | chr12 | 66581616 | 66581616 | A > G | Increasing of enhancer |
| | | | | | activity |
| IRF5 | chr7 | 128573967 | 128573967 | G > A | Increasing of enhancer |
| | | | | | activity |
| IRF5 | chr7 | 128573967 | 128573967 | G > A | Increasing of enhancer |
| | | | | | activity |
| IRF5 | chr7 | 128573967 | 128573967 | G > A | Increasing of enhancer |
| | | | | | activity |
| IRF5 | chr7 | 128573967 | 128573967 | G > A | Increasing of enhancer |
| | | | | | activity |
| IRF5 | chr7 | 128573967 | 128573967 | G > A | Increasing of enhancer |
| | | | | | activity |
| IRF5 | chr7 | 128573967 | 128573967 | G > A | Increasing of enhancer |
| | | | | | activity |
| IRF6 | chr1 | 209989270 | 209989270 | G > A | Decreasing of enhancer |
| | | | | | activity |
| IRF6 | chr1 | 209989270 | 209989270 | G > A | Loss of AP-2alpha motif and |
| | | | | | TFAP2A motif; Decreasing of |
| | | | | | enhancer activity |
| IRF6 | chr1 | 209989270 | 209989270 | G > A | Loss of AP-2CE± binding; Loss |
| | | | | | of enhancer activity |
| IRS4 | | NA | NA | | Gain of enhancer |
| IRS4 | | NA | NA | | Gain of enhancer |
| IRS4 | | NA | NA | | Gain of enhancer |
| IRS4 | | NA | NA | | Gain of enhancer |
| IRX3 | chr16 | 53830465 | 53830465 | G > A | Increasing of enhancer |
| | | | | | activity |
| IRX3 | chr16 | 53830465 | 53830465 | G > A | Increasing of enhancer |
| | | | | | activity |
| IRX5, IRX3 | chr16 | 53800954 | 53800954 | T > C | Loss of ARID5B motif; Gain of |
| | | | | | enhancer |
| ITGAM | chr16 | 31276811 | 31276811 | G > A | Decreasing of enhancer |
| | | | | | activity |
| ITK | chr5 | 156607793 | 156607793 | C > T | Increasing of enhancer |
| | | | | | activity |
| JAZF1 | chr7 | 27976563 | 27976563 | A > G | Gain of NKX3-1 motif; Loss of |
| | | | | | FOXA1 motif; Decreasing of |
| | | | | | enhancer activity |
| JMJD2C, | chr16 | 68820946 | 68820946 | G > A | Decreasing of enhancer |
| TMED6 | | | | | activity |
| JUN | chr1 | 59250452 | 59250452 | A > G | Increasing of enhancer |
| | | | | | activity |
| JUN | chr1 | 59251097 | 59251097 | T > G | Increasing of enhancer |
| | | | | | activity |
| KCNQ1 | chr11 | 2847069 | 2847069 | T > G | |
| KCNQ1 | | NA | NA | | Gain of enhancer |
| KCNQ1 | | NA | NA | | Gain of enhancer |
| KCNQ1 | | NA | NA | | Gain of enhancer |
| KCNQ1 | | NA | NA | | Gain of enhancer |
| KCNQ1 | | NA | NA | | Gain of enhancer |
| KCNQ1 | | NA | NA | | Gain of enhancer |
| KCNQ1 | | NA | NA | | Gain of enhancer |
| KCNQ1 | | NA | NA | | Gain of enhancer |
| KCNQ1 | | NA | NA | | Gain of enhancer |
| KCNQ1 | | NA | NA | | Gain of enhancer |
| KCNQ1 | | NA | NA | | Gain of enhancer |
| KCNQ1 | | NA | NA | | Gain of enhancer |
| KCNQ1 | | NA | NA | | Gain of enhancer |
| KCNQ1 | | NA | NA | | Gain of enhancer |
| KCNQ1 | | NA | NA | | Gain of enhancer |
| KCNQ1 | | NA | NA | | Gain of enhancer |
| KCNQ1 | | NA | NA | | Gain of enhancer |
| KDELR2 | chr7 | 6515150 | 6515150 | A > G | Decreasing of enhancer |
| | | | | | activity |
| KDM5A, | chr12 | 349298 | 349298 | C > T | Increasing of enhancer |
| CCDC77, | | | | | activity |
| LOC1002 | | | | | |
| 88778 | | | | | |
| KLF5 | chr13 | 73880413 | 74042621 | Amplification | Gain of enhancer |
| KLF5 | chr13 | 73880413 | 74042621 | Amplification | Gain of enhancer |
| KLF5 | chr13 | 73880413 | 74042621 | Amplification | Gain of enhancer |
| KLF5 | chr13 | 73880413 | 74042621 | Amplification | Gain of enhancer |
| KLF5 | chr13 | 73880680 | 73990596 | Amplification | Gain of enhancer |
| KLF5 | chr13 | 73880680 | 73990596 | Amplification | Gain of enhancer |
| KLK14, SYT3, | chr19 | 51773802 | 51773802 | A > G | Increasing of enhancer |
| LRRC4B, | | | | | activity |
| IGLON5 | | | | | |
| KRT80 | chr12 | 52345023 | 52345023 | G > T | Change of SP4 binding |
| KRT80 | chr12 | 52345376 | 52345376 | G > T | Change of SP4 binding |
| KRT80 | chr12 | 53459012 | 53459012 | G > C | Change of SP4 binding |
| KRT80 | chr12 | 52417086 | 52417086 | C > T | Change of SP4 binding |
| KRT80 | chr12 | 52417086 | 52417086 | C > T | Change of SP4 binding |
| KRTCAP3, | chr2 | 27730940 | 27730940 | T > T | Increasing of enhancer |
| ZNF513, | | | | | activity |
| FTHL3P, | | | | | |
| SNX17, | | | | | |
| PPM1G, | | | | | |
| NRBP1, | | | | | |
| ZNF512, | | | | | |
| CCDC121, | | | | | |
| SLC4A1AP, | | | | | |
| SUPT7L, | | | | | |
| AGBL5, | | | | | |
| SLC30A3, | | | | | |
| GPN1, | | | | | |
| MPV17, | | | | | |
| GCKR, | | | | | |
| IFT172, | | | | | |
| FNDC4, | | | | | |
| GTF3C2, | | | | | |
| EIF2B4, | | | | | |
| RBKS, BRE, | | | | | |
| C2orf16, | | | | | |
| UCN | | | | | |
| LAMA5 | chr20 | 60909815 | 60909815 | G > C | Change of SP3 binding |
| LAMA5 | chr20 | 60909815 | 60909815 | G > C | Change of SP4 binding |
| LAMA5 | chr20 | 60999979 | 60999979 | T > G | Change of SP3 binding |
| LAMA5 | chr20 | 60999979 | 60999979 | T > G | Change of SP4 binding |
| LAMA5 | chr20 | 61686432 | 61686432 | G > A | Change of SP3 binding |
| LAMA5 | chr20 | 61686432 | 61686432 | G > A | Change of SP4 binding |
| LAMA5 | chr20 | 60878221 | 60878221 | T > G | Change of SP3 binding |
| LAMA5 | chr20 | 60878221 | 60878221 | T > G | Change of SP4 binding |
| LBH | chr2 | 30448344 | 30448344 | T > G | Decreasing of enhancer |
| | | | | | activity |
| LBX1 | chr10 | 102979207 | 102979207 | C > T | |
| LIPA | | NA | NA | | Gain of enhancer |
| LIPA | | NA | NA | | Gain of enhancer |
| LIPA | | NA | NA | | Gain of enhancer |
| LIPA | | NA | NA | | Gain of enhancer |
| LIPA | | NA | NA | | Gain of enhancer |
| LIPA | | NA | NA | | Gain of enhancer |
| LIPA | | NA | NA | | Gain of enhancer |
| LIPA | | NA | NA | | Gain of enhancer |
| LIPA | | NA | NA | | Gain of enhancer |
| LMNB1 | chr5 | 125385805 | 126043053 | Deletion | Enhancer hijacking; Loss of |
| | | | | | intrinsic enhancer; Gain of |
| | | | | | new enhancer |
| LMNB1 | chr5 | 125385805 | 126043053 | Deletion | Enhancer hijacking; Loss of |
| | | | | | intrinsic enhancer; Gain of |
| | | | | | new enhancer |
| LMNB1 | chr5 | 125385805 | 126043053 | Deletion | Enhancer hijacking; Loss of |
| | | | | | intrinsic enhancer; Gain of |
| | | | | | new enhancer |
| LMO1 | chr11 | 8289480 | 8289480 | C > T | Gain of MYB binding; Gain of |
| | | | | | enhancer |
| LMO1 | chr11 | 8255408 | 8255408 | T > G | Gain of GATA motif; |
| | | | | | Increasing of enhancer |
| | | | | | activity |
| LPP, BCL6 | chr3 | 187713718 | 187713718 | T > A | Increasing of enhancer |
| | | | | | activity |
| LRIG1 | chr3 | 66798950 | 66798950 | C > G | Increasing of enhancer |
| | | | | | activity |
| LRP1 | chr12 | 57534470 | 57534470 | T > C | Gain of SREBP-1 motif; |
| | | | | | Increasing of enhancer |
| | | | | | activity |
| LTA | chr6 | 31526856 | 31526856 | T > C | Decreasing of enhancer |
| | | | | | activity |
| MAF | chr16 | 79645989 | 79645989 | C > A | Increasing of enhancer |
| | | | | | activity |
| MAP3K1 | chr5 | 55711489 | 55711489 | C > T | Change of ZNF678 binding |
| MAP3K1 | chr5 | 55724929 | 55724929 | C > G | Change ofTFCP2 binding |
| MAP3K1 | chr5 | 55786238 | 55786238 | G > A | Change of RARB binding |
| MAP3K1 | chr5 | 55786238 | 55786238 | G > A | Change of ZNF501 binding |
| MAP3K1 | chr5 | 55786238 | 55786238 | G > A | Change of ZNF713 binding |
| MAP3K1 | chr5 | 55832915 | 55832915 | T > G | Change of PEG3 binding |
| MAP3K1 | chr5 | 55969689 | 55969689 | G > A | Change of SOX15 binding |
| MAP3K1 | chr5 | 55969689 | 55969689 | G > A | Change of SOX18 binding |
| MAP3K1 | chr5 | 55969689 | 55969689 | G > A | Change of SOX21 binding |
| MAP3K1 | chr5 | 55969689 | 55969689 | G > A | Change of SOX2 binding |
| MAP3K1 | chr5 | 55969689 | 55969689 | G > A | Change of SOX7 binding |
| MAP3K1 | chr5 | 55969689 | 55969689 | G > A | Change of SRY binding |
| MAP3K13 | chr3 | 184919694 | 184919694 | G > C | Change of POU1F1 binding |
| MAP3K13 | chr3 | 184919694 | 184919694 | G > C | Change of ZNF501 binding |
| MAP3K13 | chr3 | 185216716 | 185216716 | C > G | Change of TFCP2 binding |
| MAST2 | chr1 | 46476824 | 46476824 | C > - | Increasing of enhancer |
| | | | | | activity |
| MAST2 | chr1 | 46476865 | 46476865 | C > T | Increasing of enhancer |
| | | | | | activity |
| MAST2 | chr1 | 46476944 | 46476944 | C > T | Increasing of enhancer |
| | | | | | activity |
| MAST2 | chr1 | 46477152 | 46477152 | C > T | Increasing of enhancer |
| | | | | | activity |
| MBL2 | chr10 | 54531685 | 54531685 | C > G | Decreasing of enhancer |
| | | | | | activity |
| MBL2 | chr10 | 54532014 | 54532014 | C > G | Decreasing of enhancer |
| | | | | | activity |
| MECOM, | chr3 | 169150632 | 169150632 | T > C | Increasing of enhancer |
| MYNN, | | | | | activity |
| ARPM1 | | | | | |
| MERTK | chr2 | 112753097 | 112753097 | C > A | Gain of IRF1 motif; |
| | | | | | Decreasing of enhancer |
| | | | | | activity |
| MET | chr7 | 115956171 | 115956171 | C > A | Change of F0XJ2 binding |
| MET | chr7 | 115957320 | 115957320 | G > C | Change of ZNF136 binding |
| MET | chr7 | 115957320 | 115957320 | G > C | Change of ZNF670 binding |
| MET | chr7 | 115994876 | 115994876 | C > T | Change of TEAD1 binding |
| MET | chr7 | 116312444 | 116312444 | G > T | Change of BHLHE41 binding |
| MET | chr7 | 116312444 | 116312444 | G > T | Change of HEYL binding |
| MET | chr7 | 116312444 | 116312444 | G > T | Change of TFAP4 binding |
| MET | chr7 | 116312444 | 116312444 | G > T | Change of USF1 binding |
| MET | chr7 | 116312444 | 116312444 | G > T | Change of USF2 binding |
| MET | chr7 | 116312573 | 116312573 | G > C | Change of E2F1 binding |
| MET | chr7 | 116312573 | 116312573 | G > C | Change of NPAS3 binding |
| MET | chr7 | 116312573 | 116312573 | G > C | Change of SP1 binding |
| MET | chr7 | 116312573 | 116312573 | G > C | Change of SP3 binding |
| MET | chr7 | 116312573 | 116312573 | G > C | Change of SP4 binding |
| MET | chr7 | 116312573 | 116312573 | G > C | Change of ZBTB7B binding |
| MET | chr7 | 116314193 | 116314193 | T > G | Change of ZFX binding |
| MET | chr7 | 116911021 | 116911021 | C > G | Change of MEIS2 binding |
| MET | chr7 | 116911021 | 116911021 | C > G | Change of MEIS3 binding |
| MET | chr7 | 116911021 | 116911021 | C > G | Change of TGIF1 binding |
| MET | chr7 | 116911040 | 116911040 | C > A | Change of ZNF282 binding |
| METRNL | chr17 | 81153381 | 81153381 | G > A | Change of ZNF735 binding |
| METRNL | chr17 | 81153656 | 81153656 | C > T | Change of EGR1 binding |
| METRNL | chr17 | 81153656 | 81153656 | C > T | Change of ZNF735 binding |
| METRNL | chr17 | 81153663 | 81153663 | C > T | Change of ZNF735 binding |
| METRNL | chr17 | 81153381 | 81153381 | G > A | Change of ZNF735 binding |
| METRNL | chr17 | 81153656 | 81153656 | C > T | Change of EGR1 binding |
| METRNL | chr17 | 81153656 | 81153656 | C > T | Change of ZNF735 binding |
| METRNL | chr17 | 81153663 | 81153663 | C > T | Change of ZNF735 binding |
| METRNL | chr17 | 81026079 | 81026079 | C > T | Change of EGR1 binding |
| METRNL | chr17 | 81026112 | 81026112 | G > A | Change of EGR1 binding |
| miR-122 | chr18 | 56085917 | 56085917 | C > A | Decreasing of enhancer |
| | | | | | activity |
| MIR137, | chr1 | 98515539 | 98515539 | T > A | Reducing of YYl binding; |
| MIR2682 | | | | | Decreasing of enhancer |
| | | | | | activity |
| MIR137, | chr1 | 98515539 | 98515539 | T > A | Reducing of YYl binding; |
| MIR2682 | | | | | Decreasing of enhancer |
| | | | | | activity |
| miR-200b | chr1 | 1099342 | 1099342 | C > A | Change of BRCA1; CHD2 motif |
| mir30a | chr6 | 72115621 | 72115621 | G > A | Change of AIRE; Sox motif |
| MLH1 | chr3 | 37035012 | 37035012 | C > A | Gain of HSF1; HSF2 binding; |
| | | | | | Decreasing of enhancer |
| | | | | | activity |
| MLLT4 | | NA | NA | | Gain of enhancer |
| MLLT4 | | NA | NA | | Gain of enhancer |
| MLLT4 | | NA | NA | | Gain of enhancer |
| MLLT4 | | NA | NA | | Gain of enhancer |
| MLLT4 | | NA | NA | | Gain of enhancer |
| MLLT4 | | NA | NA | | Gain of enhancer |
| MLLT4 | | NA | NA | | Gain of enhancer |
| MLLT4 | | NA | NA | | Gain of enhancer |
| MLLT4 | | NA | NA | | Gain of enhancer |
| MLLT4 | | NA | NA | | Gain of enhancer |
| MLLT4 | | NA | NA | | Gain of enhancer |
| MLLT4 | | NA | NA | | Gain of enhancer |
| MLLT4 | | NA | NA | | Gain of enhancer |
| MR1 | chr1 | 181020230 | 181020230 | A > G | |
| MRPS30, | chr5 | 44706498 | 44706498 | A > G | Gain of enhancer |
| FGF10 | | | | | |
| MSMB | chr10 | 51549496 | 51549496 | C > T | Decreasing of enhancer |
| | | | | | activity |
| MSNP1AS | chr5 | 25967703 | 25967703 | C > T | Increasing of enhancer |
| | | | | | activity |
| MTAP, | chr9 | 22124477 | 22124477 | A > G | Loss of STAT1 motif; |
| CDKN2B- | | | | | Decreasing of enhancer |
| AS1, | | | | | activity |
| CDKN2A, | | | | | |
| CDKN2B | | | | | |
| MTHFD1L | | NA | NA | | Gain of enhancer |
| MTHFD1L | | NA | NA | | Gain of enhancer |
| MTHFD1L | | NA | NA | | Gain of enhancer |
| MTHFD1L | | NA | NA | | Gain of enhancer |
| MTHFD1L | | NA | NA | | Gain of enhancer |
| MTHFD1L | | NA | NA | | Gain of enhancer |
| MTHFD1L | | NA | NA | | Gain of enhancer |
| MTHFD1L | | NA | NA | | Gain of enhancer |
| MTHFD1L | | NA | NA | | Gain of enhancer |
| MTHFD1L | | NA | NA | | Gain of enhancer |
| MTHFD1L | | NA | NA | | Gain of enhancer |
| MUC1, | chr1 | 150951477 | 150951477 | T > C | Increasing of enhancer |
| C1orf54, | | | | | activity |
| THBS3, | | | | | |
| PSMB4, GBA, | | | | | |
| GBAP, | | | | | |
| APH1A, | | | | | |
| CTSS, | | | | | |
| ANP32E, | | | | | |
| ECM1, | | | | | |
| C1orf51, | | | | | |
| NBPF10, | | | | | |
| CA14, | | | | | |
| LYSMD1, | | | | | |
| CTSK, ARNT, | | | | | |
| SETDB1, | | | | | |
| LASS2, | | | | | |
| ANXA9, | | | | | |
| G0LPH3L, | | | | | |
| PRUNE, | | | | | |
| C1orf56, | | | | | |
| CDC42SE1, | | | | | |
| MLLT11, | | | | | |
| MRPS21, | | | | | |
| PRPF3, | | | | | |
| RPRD2, | | | | | |
| TARS2, | | | | | |
| VPS72, | | | | | |
| ADAMTSL4, | | | | | |
| MCL1, ENSA, | | | | | |
| SEMA6C, | | | | | |
| SCNM1, | | | | | |
| GABPB2, | | | | | |
| PIP5K1A, | | | | | |
| FAM63A, | | | | | |
| PSMD4 | | | | | |
| MYB | NA | NA | NA | Rearrangement | Gain of enhancer |
| MYC | NA | NA | NA | t(3; 8)(q27; q24) | Gain of enhancer |
| MYC | NA | NA | NA | t(3; 8)(q27; q24) | Gain of enhancer |
| MYC | chr8 | 129543949 | 129554294 | Amplification | Gain of enhancer |
| MYC | chr8 | 129166547 | 129190290 | Amplification | Gain of enhancer |
| MYC | chr8 | 128413305 | 128413305 | T > G | Increasing of enhancer |
| | | | | | activity |
| MYC | chr8 | 128407443 | 128407443 | A > G | Increasing of enhancer |
| | | | | | activity |
| MYC | chr8 | 128413305 | 128413305 | T > G | Gain of enhancer activity |
| MYC | chr8 | 128413305 | 128413305 | T > G | Gain of TCF4 motif; Gain of |
| | | | | | enhancer activity |
| MYC | chr8 | 128413305 | 128413305 | T > G | Gain of TCF4 motif; |
| | | | | | Increasing of enhancer |
| | | | | | activity |
| MYC | chr8 | 128413305 | 128413305 | G > T | Gain of TCF7L2 motif; |
| | | | | | Increasing of enhancer |
| | | | | | activity |
| MYC | chr8 | 128413305 | 128413305 | T > G | Gain of TCF7L2 motif; |
| | | | | | Increasing of enhancer |
| | | | | | activity |
| MYC | chr8 | 128413305 | 128413305 | G > T | Gain of TCF7L2 motif; Loss of |
| | | | | | TCF4 motif; Increasing of |
| | | | | | enhancer activity |
| MYC | chr8 | 128413305 | 128413305 | T > G | Increasing of enhancer |
| | | | | | activity |
| MYC | chr8 | 128413305 | 128413305 | | |
| MYC | chr8 | 128413305 | 128413305 | T > G | |
| MYC | chr8 | 128413305 | 128413305 | T > G | Gain of enhancer activity |
| MYC | chr8 | 128654265 | 128654265 | | |
| MYC | chr8 | 128755080 | 128755080 | | Loss of TCF binding; Loss of |
| | | | | | enhancer |
| MYC | chr8 | 130161775 | 130202012 | Duplication | Gain of enhancer |
| MYC | chr8 | 128011937 | 128011937 | T > C | Increasing of enhancer |
| | | | | | activity |
| MYC | chr8 | 128532137 | 128532137 | T > C | Increasing of enhancer |
| | | | | | activity |
| MYC | chr8 | 128532137 | 128532137 | C > T | Increasing of enhancer |
| | | | | | activity |
| MYC | chr8 | 128093297 | 128093297 | C > T | Increasing of enhancer |
| | | | | | activity |
| MYC | chr8 | 128531689 | 128531689 | A > T | Gain of FoxAl motif; |
| | | | | | Increasing of enhancer |
| | | | | | activity |
| MYC | chr8 | 128531873 | 128531873 | G > A | Increasing of enhancer |
| | | | | | activity |
| MYC | chr8 | 127924659 | 127924659 | C > A | Increasing of enhancer |
| | | | | | activity |
| MYC | chr8 | 128095156 | 128095156 | A > G | Increasing of enhancer |
| | | | | | activity |
| MYC | chr8 | 129076573 | 129076573 | C > T | |
| MYC | chr8 | 128485038 | 128485038 | A > C | Increasing of enhancer |
| | | | | | activity |
| MYC | chr8 | 128485038 | 128485038 | C > A | Increasing of enhancer |
| | | | | | activity |
| MYC | chr8 | 128124126 | 128124126 | T > G | Increasing of enhancer |
| | | | | | activity |
| MYC | chr8 | 128124916 | 128124916 | C > A | Increasing of enhancer |
| | | | | | activity |
| MYC | chr8 | 128192981 | 128192981 | A > G | |
| MYC | chr8 | 130645692 | 130645692 | A > G | Gain of enhancer |
| MYC | chr8 | 128335673 | 128335673 | G > A | Increasing of enhancer |
| | | | | | activity |
| MYC | chr8 | 128106880 | 128106880 | A > C | Increasing of enhancer |
| | | | | | activity |
| MYC | chr8 | 129186548 | 129186548 | A > T | |
| MYC | chr8 | 128539360 | 128539360 | T > G | Increasing of enhancer |
| | | | | | activity |
| MYLK | chr3 | 123415781 | 123415781 | G > A | Loss of FOXN1 motif; |
| | | | | | Decreasing of FOXN1 binding; |
| | | | | | Decreasing of enhancer |
| | | | | | activity |
| NBN | chr8 | 91585087 | 91585087 | G > C | Change of HOXC5 binding |
| NBN | chr8 | 91585087 | 91585087 | G > C | Change of PRDM1 binding |
| NBN | chr8 | 91585087 | 91585087 | G > C | Change of ZNF263 binding |
| NCK1 | chr3 | 136801938 | 136801938 | A > C | Increasing of enhancer |
| | | | | | activity |
| NCOR1 | chr17 | 16126784 | 16126784 | A > G | Change of POLR3A binding |
| NCOR1 | chr17 | 16126784 | 16126784 | A > G | Change of TOPORS binding |
| NCOR1 | chr17 | 16128122 | 16128122 | C > T | Change of TP53 binding |
| NCOR1 | chr17 | 16128122 | 16128122 | C > T | Change of TP63 binding |
| NCOR1 | chr17 | 16128122 | 16128122 | C > T | Change of ZNF143 binding |
| NCOR1 | chr17 | 16128122 | 16128122 | C > T | Change of ZNF302 binding |
| NCOR1 | chr17 | 16128122 | 16128122 | C > T | Change of ZNF425 binding |
| NCOR1 | chr17 | 16128122 | 16128122 | C > T | Change of ZNF679 binding |
| NCOR1 | | NA | NA | | Gain of enhancer |
| NCOR1 | | NA | NA | | Gain of enhancer |
| NCOR1 | | NA | NA | | Gain of enhancer |
| NCOR1 | | NA | NA | | Gain of enhancer |
| NCOR1 | | NA | NA | | Gain of enhancer |
| NCOR1 | | NA | NA | | Gain of enhancer |
| NCOR1 | | NA | NA | | Gain of enhancer |
| NCOR1 | | NA | NA | | Gain of enhancer |
| NCOR1 | | NA | NA | | Gain of enhancer |
| NCOR1 | | NA | NA | | Gain of enhancer |
| NCOR1 | | NA | NA | | Gain of enhancer |
| NCOR1 | | NA | NA | | Gain of enhancer |
| NCOR1 | | NA | NA | | Gain of enhancer |
| NEK4 | chr3 | 52819327 | 52819327 | T > A | Decreasing of enhancer |
| | | | | | activity |
| NGEF | chr2 | 233743109 | 233743109 | A > G | Decreasing of enhancer |
| | | | | | activity |
| NKAIN4 | chr20 | 62085791 | 62085791 | G > A | Change of EGR1 binding |
| NKAIN4 | chr20 | 62085791 | 62085791 | G > A | Change of MAZ binding |
| NKAIN4 | chr20 | 62085791 | 62085791 | G > A | Change of SP1 binding |
| NKAIN4 | chr20 | 62085791 | 62085791 | G > A | Change of SP2 binding |
| NKAIN4 | chr20 | 62085791 | 62085791 | G > A | Change of SP3 binding |
| NKAIN4 | chr20 | 62085791 | 62085791 | G > A | Change of ZNF263 binding |
| NKAIN4 | chr20 | 62133292 | 62133292 | T > G | Change of EGR1 binding |
| NKAIN4 | chr20 | 62133292 | 62133292 | T > G | Change of EGR4 binding |
| NKAIN4 | chr20 | 62133292 | 62133292 | T > G | Change of MAZ binding |
| NKAIN4 | chr20 | 62133292 | 62133292 | T > G | Change of SP1 binding |
| NKAIN4 | chr20 | 62133292 | 62133292 | T > G | Change of SP2 binding |
| NKAIN4 | chr20 | 62133292 | 62133292 | T > G | Change of SP3 binding |
| NKAIN4 | chr20 | 62133292 | 62133292 | T > G | Change of SP4 binding |
| NKAIN4 | chr20 | 62133292 | 62133292 | T > G | Change of ZNF263 binding |
| NKAIN4 | chr20 | 62133292 | 62133292 | T > G | Change of ZNF281 binding |
| NKAIN4 | chr20 | 61962472 | 61962472 | A > G | Change of SP1 binding |
| NKAIN4 | chr20 | 61962472 | 61962472 | A > G | Change of SP3 binding |
| NKAIN4 | chr20 | 61962472 | 61962472 | A > G | Change of SP4 binding |
| NKAIN4 | chr20 | 61885983 | 61885983 | A > C | Change of EGR1 binding |
| NKAIN4 | chr20 | 61885983 | 61885983 | A > C | Change of EGR4 binding |
| NKAIN4 | chr20 | 61885983 | 61885983 | A > C | Change of MAZ binding |
| NKAIN4 | chr20 | 61885983 | 61885983 | A > C | Change of SP1 binding |
| NKAIN4 | chr20 | 61885983 | 61885983 | A > C | Change of SP2 binding |
| NKAIN4 | chr20 | 61885983 | 61885983 | A > C | Change of SP3 binding |
| NKAIN4 | chr20 | 61885983 | 61885983 | A > C | Change of SP4 binding |
| NKAIN4 | chr20 | 61885983 | 61885983 | A > C | Change of ZNF263 binding |
| NKAIN4 | chr20 | 61885983 | 61885983 | A > C | Change of ZNF281 binding |
| NKAIN4 | chr20 | 61806945 | 61806945 | T > G | Change of EGR1 binding |
| NKAIN4 | chr20 | 61806945 | 61806945 | T > G | Change of SP1 binding |
| NKAIN4 | chr20 | 61806945 | 61806945 | T > G | Change of ZNF281 binding |
| NKAIN4 | chr20 | 61898173 | 61898173 | C > A | Change of EGR4 binding |
| NOG | chr17 | 54773238 | 54773238 | A > T | Loss ofMEFZCand CDX2 |
| | | | | | binding ; Loss of enhancer |
| | | | | | activity |
| NOS1AP | chr1 | 162021000 | 162021000 | A > G | Increasing of enhancer |
| | | | | | activity |
| NOS1AP | chr1 | 162020969 | 162020969 | A > T | Increasing of enhancer |
| | | | | | activity |
| NOS2 | chr17 | 26132301 | 26139107 | Duplication | Gain of enhancer |
| NOS2 | chr7 | 26132301 | 26139107 | Duplication | Gain of enhancer |
| NOTCH1 | chr9 | 139414453 | 139414453 | T > G | Change of EGR4 binding |
| NOTCH1 | chr9 | 139414453 | 139414453 | T > G | Change of GLI2 binding |
| NOTCH1 | chr9 | 139414453 | 139414453 | T > G | Change of KLF1 binding |
| NOTCH1 | chr9 | 139414453 | 139414453 | T > G | Change of WT1 binding |
| NOTCH1 | chr9 | 139414453 | 139414453 | T > G | Change ofZBTB11 binding |
| NOTCH1 | chr9 | 139414453 | 139414453 | T > G | Change of ZBTB7B binding |
| NOTCH1 | chr9 | 139414453 | 139414453 | T > G | Change of ZNF837 binding |
| NOTCH1 | chr9 | 139460020 | 139460020 | G > T | Change of ZEB1 binding |
| NOTCH1 | chr9 | 139460020 | 139460020 | G > T | Change of ZNF555 binding |
| NOTCH1 | chr9 | 139460279 | 139460279 | G > C | Change of ZAC binding |
| NOTCH1 | chr9 | 139460279 | 139460279 | G > C | Change of ZNF208 binding |
| NOTCH1 | chr9 | 139492936 | 139492936 | G > C | Change of KLF15 binding |
| NOTCH1 | chr9 | 139492936 | 139492936 | G > C | Change of KLF16 binding |
| NOTCH1 | chr9 | 139492936 | 139492936 | G > C | Change of ZNF263 binding |
| NOTCH1 | chr9 | 139492936 | 139492936 | G > C | Change of ZNF599 binding |
| NOTCH1 | chr9 | 139503959 | 139503959 | C > G | Change of ZNF283 binding |
| NOTCH1 | chr9 | 139503959 | 139503959 | C > G | Change of ZNF729 binding |
| NOTCH1 | chr9 | 139503959 | 139503959 | C > G | Change of ZNF814 binding |
| NOTCH1 | chr9 | 139512789 | 139512789 | A > G | Change of TFCP2 binding |
| NOTCH1 | chr9 | 139512789 | 139512789 | A > G | Change of TP73 binding |
| NOTCH1 | chr9 | 139512789 | 139512789 | A > G | Change of ZNF80 binding |
| NOTCH1 | chr9 | 139513656 | 139513656 | G > A | Change of FOXRI binding |
| NOTCH1 | chr9 | 139929812 | 139929812 | G > A | Change of NHLH2 binding |
| NOTCH1 | chr9 | 139929812 | 139929812 | G > A | Change of TCF12 binding |
| NOTCH1 | chr9 | 139929812 | 139929812 | G > A | Change ofTCF3 binding |
| NOTCH1 | chr9 | 139929812 | 139929812 | G > A | Change of ZNF524 binding |
| NOTCH2 | chr1 | 121112052 | 121112052 | G > C | |
| NR3C1 | chr5 | 142782299 | 142782299 | C > T | Change of SP4 binding |
| NR3C1 | chr5 | 142782658 | 142782658 | A > C | Change of SP1 binding |
| NR3C1 | chr5 | 142782658 | 142782658 | A > C | Change of SP3 binding |
| NR3C1 | chr5 | 142782658 | 142782658 | A > C | Change of SP4 binding |
| NR3C1 | chr5 | 142782995 | 142782995 | G > A | Change of SP1 binding |
| NR3C1 | chr5 | 142782995 | 142782995 | G > A | Change of SP3 binding |
| NR3C1 | chr5 | 142782995 | 142782995 | G > A | Change of SP4 binding |
| NR3C1 | chr5 | 142783252 | 142783252 | G > T | Change of SP1 binding |
| NR3C1 | chr5 | 142783252 | 142783252 | G > T | Change of SP3 binding |
| NR3C1 | chr5 | 142783252 | 142783252 | G > T | Change of SP4 binding |
| NR3C1 | chr5 | 142783284 | 142783284 | T > C | Change of SP1 binding |
| NR3C1 | chr5 | 142783284 | 142783284 | T > C | Change of SP3 binding |
| NR3C1 | chr5 | 142783284 | 142783284 | T > C | Change of SP4 binding |
| NR3C1 | chr5 | 142783293 | 142783293 | A > C | Change of SP1 binding |
| NR3C1 | chr5 | 142783293 | 142783293 | A > C | Change of SP3 binding |
| NR3C1 | chr5 | 142783293 | 142783293 | A > C | Change of SP4 binding |
| NR3C1 | chr5 | 142783319 | 142783319 | G > A | Change of SP4 binding |
| NR3C1 | chr5 | 142783408 | 142783408 | G > C | Change of SP1 binding |
| NR3C1 | chr5 | 142783408 | 142783408 | G > C | Change of SP3 binding |
| NR3C1 | chr5 | 142783408 | 142783408 | G > C | Change of SP4 binding |
| NR3C1 | chr5 | 142783464 | 142783464 | T > G | Change of SP3 binding |
| NR3C1 | chr5 | 142783464 | 142783464 | T > G | Change of SP4 binding |
| NR3C1 | chr5 | 142783466 | 142783466 | G > A | Change of SP1 binding |
| NR3C1 | chr5 | 142783466 | 142783466 | G > A | Change of SP3 binding |
| NR3C1 | chr5 | 142783466 | 142783466 | G > A | Change of SP4 binding |
| NR3C1 | chr5 | 142783474 | 142783474 | G > C | Change of SP1 binding |
| NR3C1 | chr5 | 142783474 | 142783474 | G > C | Change of SP3 binding |
| NR3C1 | chr5 | 142783474 | 142783474 | G > C | Change of SP4 binding |
| NR3C1 | chr5 | 141228722 | 141228722 | C > G | Change of SP1 binding |
| NR3C1 | chr5 | 141228722 | 141228722 | C > G | Change of SP3 binding |
| NR3C1 | chr5 | 141228722 | 141228722 | C > G | Change of SP4 binding |
| NR3C1 | chr5 | 141229405 | 141229405 | G > A | Change of SP1 binding |
| NR3C1 | chr5 | 141229405 | 141229405 | G > A | Change of SP3 binding |
| NR3C1 | chr5 | 141229405 | 141229405 | G > A | Change of SP4 binding |
| NRAS | chr1 | 115300152 | 115300152 | T > G | Change of ELF3 binding |
| NRAS | chr1 | 115300152 | 115300152 | T > G | Change of FOXO6 binding |
| NRAS | chr1 | 115300152 | 115300152 | T > G | Change of STAT2 binding |
| NRAS | chr1 | 115300152 | 115300152 | T > G | Change of ZNF708 binding |
| NRAS | chr1 | 115300224 | 115300224 | C > T | Change of EGR4 binding |
| NRAS | chr1 | 115300224 | 115300224 | C > T | Change of PRDM9 binding |
| NRAS | chr1 | 115300224 | 115300224 | C > T | Change of SP1 binding |
| NRAS | chr1 | 115300224 | 115300224 | C > T | Change of SP3 binding |
| NRAS | chr1 | 115300224 | 115300224 | C > T | Change of SP4 binding |
| NRAS | chr1 | 115300224 | 115300224 | C > T | Change of WT1 binding |
| NRAS | chr1 | 115300224 | 115300224 | C > T | Change of ZNF148 binding |
| NRAS | chr1 | 115300224 | 115300224 | C > T | Change of ZNF790 binding |
| NRG1 | chr8 | 31495581 | 31495581 | C > T | Gain of ZNF581; ZNF524; |
| | | | | | FOXH1 binding; Decreasing of |
| | | | | | enhancer activity |
| NRGN | chr11 | 124609907 | 124609907 | C > G | Gain of NR2C2 binding; |
| | | | | | Decreasing of enhancer |
| | | | | | activity |
| NSD1, | chr5 | 176817636 | 176817636 | A > G | Increasing of enhancer |
| MXD3, | | | | | activity |
| LMAN2, | | | | | |
| RAB24, | | | | | |
| PRELID1, | | | | | |
| GRK6, PRR7, | | | | | |
| RGS14, F12, | | | | | |
| DOK3, | | | | | |
| DDX41, | | | | | |
| FAM193B, | | | | | |
| UIMC1, | | | | | |
| FGFR4, | | | | | |
| SLC34A1, | | | | | |
| TMED9, | | | | | |
| B4GALT7, | | | | | |
| PDLIM7, | | | | | |
| DBN1 | | | | | |
| NT5C2 | chr10 | 104653545 | 104653545 | T > C | Decreasing of enhancer |
| | | | | | activity |
| NUB1, RHEB, | chr7 | 151407801 | 151407801 | G > A | Increasing of enhancer |
| PRKAG2 | | | | | activity |
| NUDT11 | chrX | 51505931 | 51505931 | T > C | Increasing of enhancer |
| | | | | | activity |
| NXT1, CST1, | chr20 | 23612737 | 23612737 | C > C | Increasing of enhancer |
| GZF1, NAPB, | | | | | activity |
| CST3, CST2, | | | | | |
| CST5, | | | | | |
| ENTPD6, | | | | | |
| PYGB, CST8, | | | | | |
| CST4, SSTR4, | | | | | |
| THBD | | | | | |
| OCIAD2 | chr4 | 49126582 | 49126582 | T > A | Change of ZNF616 binding |
| OCIAD2 | chr4 | 49126899 | 49126899 | C > G | Change of ZNF616 binding |
| OCIAD2 | chr4 | 49127870 | 49127870 | A > T | Change of ZNF616 binding |
| OCIAD2 | chr4 | 49141001 | 49141001 | C > A | Change of ZNF616 binding |
| OCIAD2 | chr4 | 49142162 | 49142162 | A > C | Change of ZNF616 binding |
| OCIAD2 | chr4 | 49142162 | 49142162 | A > C | Change of ZNF616 binding |
| ONECUT1 | chr15 | 53942928 | 53942928 | T > C | Increasing of enhancer |
| | | | | | activity |
| ORMDL3 | chr17 | 38029120 | 38029120 | G > C | Loss of CTCF motif; |
| | | | | | Decreasing of CTCF binding; |
| | | | | | Increasing of enhancer |
| | | | | | activity |
| ORMDL3 | chr17 | 38080865 | 38080865 | A > G | Gain of CTCF motif; |
| | | | | | Increasing of CTCF binding; |
| | | | | | Increasing of enhancer |
| | | | | | activity |
| OSGIN1 | | NA | NA | | Gain of enhancer |
| OSGIN1 | | NA | NA | | Gain of enhancer |
| OSGIN1 | | NA | NA | | Gain of enhancer |
| OSGIN1 | | NA | NA | | Gain of enhancer |
| OSGIN1 | | NA | NA | | Gain of enhancer |
| OSGIN1 | | NA | NA | | Gain of enhancer |
| OSGIN1 | | NA | NA | | Gain of enhancer |
| OSGIN1 | | NA | NA | | Gain of enhancer |
| OSGIN1 | | NA | NA | | Gain of enhancer |
| OSGIN1 | | NA | NA | | Gain of enhancer |
| OSGIN1 | | NA | NA | | Gain of enhancer |
| OSGIN1 | | NA | NA | | Gain of enhancer |
| OSGIN1 | | NA | NA | | Gain of enhancer |
| PANK4 | chr1 | 2615274 | 2615274 | C > T | Change of RREB1 binding |
| PANK4 | chr1 | 2615274 | 2615274 | C > T | Change of SP3 binding |
| PANK4 | chr1 | 2617111 | 2617111 | C > A | Change of RREB1 binding |
| PANK4 | chr1 | 2617111 | 2617111 | C > A | Change of SP3 binding |
| PANK4 | chr1 | 2617159 | 2617159 | C > A | Change of RREB1 binding |
| PANK4 | chr1 | 2617159 | 2617159 | C > A | Change of SP3 binding |
| PANK4 | chr1 | 2617877 | 2617877 | C > A | Change of RREB1 binding |
| PANK4 | chr1 | 2617877 | 2617877 | C > A | Change of SP3 binding |
| PANK4 | chr1 | 2618557 | 2618557 | C > G | Change of RREB1 binding |
| PANK4 | chr1 | 2618557 | 2618557 | C > G | Change of SP3 binding |
| PANK4 | chr1 | 2246358 | 2246358 | T > G | Change of RREB1 binding |
| PANK4 | chr1 | 2246358 | 2246358 | T > G | Change of SP3 binding |
| PARD6B | chr20 | 48997377 | 49019434 | Amplification | Gain of enhancer |
| PARK2 | chr6 | 163212578 | 163212578 | G > A | Gain of FOXA motif; |
| | | | | | Decreasing of enhancer |
| | | | | | activity |
| PARK2 | chr6 | 163212465 | 163212465 | T > C | Gain of XBP-1 motif; Loss of |
| | | | | | SOX motif; Decreasing of |
| | | | | | enhancer activity |
| PAX6 | NA | NA | NA | Deletion | Loss of enhancer |
| PAX6 | chr11 | 31642266 | 31685847 | Deletion | Loss of enhancer |
| PBRM1 | chr3 | 52211851 | 52211851 | G > A | Change of ESR1 binding |
| PBRM1 | chr3 | 52211851 | 52211851 | G > A | Change of ESR2 binding |
| PBRM1 | chr3 | 52211851 | 52211851 | G > A | Change of ZEB1 binding |
| PBRM1 | chr3 | 52274776 | 52274776 | C > G | Change ofTCF3 binding |
| PBRM1 | chr3 | 52274776 | 52274776 | C > G | Change of ZNF211 binding |
| PBRM1 | chr3 | 52726385 | 52726385 | A > T | Change of FOXP4 binding |
| PBRM1 | chr3 | 52732863 | 52732863 | G > C | Change of FU20557 binding |
| PBRM1 | chr3 | 52732863 | 52732863 | G > C | Change of ZNF836 binding |
| PCAT1 | chr8 | 128104055 | 128104055 | G > T | Gain of ONECUT2 motif; |
| | | | | | Increasing of enhancer |
| | | | | | activity |
| PDE4B | chr1 | 66746784 | 66746784 | G > A | Increasing of enhancer |
| | | | | | activity |
| PEX10 | chr1 | 2475021 | 2475021 | C > T | Change of SP4 binding |
| PEX10 | chr1 | 2475021 | 2475021 | C > T | Change of SP4 binding |
| PEX10 | chr1 | 2348267 | 2348267 | G > A | Change of SP4 binding |
| PEX10 | chr1 | 2246358 | 2246358 | T > G | Change of SP4 binding |
| PEX10 | chr1 | 2246916 | 2246916 | A > C | Change of SP4 binding |
| PEX6 | chr6 | 42928461 | 42928461 | C > T | Loss of enhancer |
| PFKFB3 | chr10 | 6101713 | 6101713 | C > T | Increasing of enhancer |
| | | | | | activity |
| PFKFB3 | chr10 | 6100725 | 6100725 | A > G | Increasing of enhancer |
| | | | | | activity |
| PFKFB3 | chr10 | 6098949 | 6098949 | C > T | Decreasing of enhancer |
| | | | | | activity |
| PFKFB3 | chr10 | 6101713 | 6101713 | C > T | Increasing of enhancer |
| | | | | | activity |
| PFKFB3 | chr10 | 6100725 | 6100725 | A > G | Increasing of enhancer |
| | | | | | activity |
| PFKFB3 | chr10 | 6098949 | 6098949 | C > T | Decreasing of enhancer |
| | | | | | activity |
| PFKFB3 | chr10 | 6101713 | 6101713 | C > T | Increasing of enhancer |
| | | | | | activity |
| PFKFB3 | chr10 | 6100725 | 6100725 | A > G | Increasing of enhancer |
| | | | | | activity |
| PFKFB3 | chr10 | 6098949 | 6098949 | C > T | Decreasing of enhancer |
| | | | | | activity |
| PFKFB3 | chr10 | 6101713 | 6101713 | C > T | Increasing of enhancer |
| | | | | | activity |
| PFKFB3 | chr10 | 6100725 | 6100725 | A > G | Increasing of enhancer |
| | | | | | activity |
| PFKFB3 | chr10 | 6098949 | 6098949 | C > T | Decreasing of enhancer |
| | | | | | activity |
| PFKFB3 | chr10 | 6101713 | 6101713 | C > T | Increasing of enhancer |
| | | | | | activity |
| PFKFB3 | chr10 | 6100725 | 6100725 | A > G | Increasing of enhancer |
| | | | | | activity |
| PFKFB3 | chr10 | 6098949 | 6098949 | C > T | Decreasing of enhancer |
| | | | | | activity |
| PFKFB3 | chr10 | 6101713 | 6101713 | C > T | Increasing of enhancer |
| | | | | | activity |
| PFKFB3 | chr10 | 6100725 | 6100725 | A > G | Increasing of enhancer |
| | | | | | activity |
| PFKFB3 | chr10 | 6098949 | 6098949 | C > T | Decreasing of enhancer |
| | | | | | activity |
| PFKFB3 | chr10 | 6110875 | 6110875 | A > C | Increasing of enhancer |
| | | | | | activity |
| PFKFB3 | chr10 | 6110875 | 6110875 | A > C | Increasing of enhancer |
| | | | | | activity |
| PFKFB3 | chr10 | 6110875 | 6110875 | A > C | Increasing of enhancer |
| | | | | | activity |
| PFKFB3 | chr10 | 6110875 | 6110875 | A > C | Increasing of enhancer |
| | | | | | activity |
| PFKFB3 | chr10 | 6110875 | 6110875 | A > C | Increasing of enhancer |
| | | | | | activity |
| PFKFB3 | chr10 | 6110875 | 6110875 | A > C | Increasing of enhancer |
| | | | | | activity |
| Pgl3 | chr11 | 2186335 | 2186335 | T > C | Gain of enhancer |
| PHACTR1 | chr6 | 12903957 | 12903957 | A > G | Loss of MEF2A motif; |
| | | | | | Decreasing of enhancer |
| | | | | | activity |
| PHKG2, | chr16 | 30669784 | 30669784 | G > C | Change of SP3 binding |
| C16orf93 | | | | | |
| PHKG2, | chr16 | 30753142 | 30753142 | C > T | Change of SP3 binding |
| C16orf93 | | | | | |
| PHKG2, | chr16 | 30935409 | 30935409 | C > G | Change of SP3 binding |
| C16orf93 | | | | | |
| PHKG2, | chr16 | 31153547 | 31153547 | A > C | Change of SP3 binding |
| C16orf93 | | | | | |
| PIGM | chr1 | 160001799 | 160001799 | G > C | Gain of MIZF binding; |
| | | | | | Decreasing of enhancer |
| | | | | | activity |
| PIK3CA | chr3 | 179169002 | 179169002 | C > A | Change of EGR3 binding |
| PIK3CA | chr3 | 179169002 | 179169002 | C > A | Change of EGR4 binding |
| PIK3CA | chr3 | 179169002 | 179169002 | C > A | Change of FKLF binding |
| PIK3CA | chr3 | 179169002 | 179169002 | C > A | Change of FOXN4 binding |
| PIK3CA | chr3 | 179169002 | 179169002 | C > A | Change of KLF4 binding |
| PIK3CA | chr3 | 179169002 | 179169002 | C > A | Change of KLF5 binding |
| PIK3CA | chr3 | 179169002 | 179169002 | C > A | Change of KLF7 binding |
| PIK3CA | chr3 | 179169002 | 179169002 | C > A | Change of KLF8 binding |
| PIK3CA | chr3 | 179169002 | 179169002 | C > A | Change of OSX binding |
| PIK3CA | chr3 | 179169002 | 179169002 | C > A | Change of SP1 binding |
| PIK3CA | chr3 | 179169002 | 179169002 | C > A | Change of SP2 binding |
| PIK3CA | chr3 | 179169002 | 179169002 | C > A | Change of SP3 binding |
| PIK3CA | chr3 | 179169002 | 179169002 | C > A | Change of SP4 binding |
| PIK3CA | chr3 | 179169002 | 179169002 | C > A | Change of SP5 binding |
| PIK3CA | chr3 | 179169002 | 179169002 | C > A | Change of SP8 binding |
| PIK3CA | chr3 | 179169002 | 179169002 | C > A | Change of SP9 binding |
| PIK3CA | chr3 | 179169002 | 179169002 | C > A | Change of TIEG1 binding |
| PIK3CA | chr3 | 179169002 | 179169002 | C > A | Change of ZBTB7B binding |
| PIK3CA | chr3 | 179169002 | 179169002 | C > A | Change of ZNF143 binding |
| PIK3CA | chr3 | 179169002 | 179169002 | C > A | Change of ZNF460 binding |
| PIK3CA | chr3 | 179169300 | 179169300 | C > G | Change of EGR1 binding |
| PIK3CA | chr3 | 179169300 | 179169300 | C > G | Change of SP1 binding |
| PIK3CA | chr3 | 179169300 | 179169300 | C > G | Change of SP3 binding |
| PIK3CA | chr3 | 179169300 | 179169300 | C > G | Change of SP4 binding |
| PIK3CA | chr3 | 179169300 | 179169300 | C > G | Change of ZBTB7B binding |
| PIK3CA | chr3 | 179169300 | 179169300 | C > G | Change of ZNF148 binding |
| PIK3CA | chr3 | 179169300 | 179169300 | C > G | Change of ZNF325 binding |
| PIK3CA | chr3 | 179169404 | 179169404 | A > G | Change of E2F1 binding |
| PIK3CA | chr3 | 179169404 | 179169404 | A > G | Change of EGR4 binding |
| PIK3CA | chr3 | 179169404 | 179169404 | A > G | Change of SP4 binding |
| PIK3CA | chr3 | 179169404 | 179169404 | A > G | Change of WT1 binding |
| PIK3CA | chr3 | 179169404 | 179169404 | A > G | Change of ZBTB7B binding |
| PIK3CA | chr3 | 179169418 | 179169418 | G > A | Change of EGR4 binding |
| PIK3CA | chr3 | 179169418 | 179169418 | G > A | Change of MAZ binding |
| PIK3CA | chr3 | 179169418 | 179169418 | G > A | Change of PLAG1 binding |
| PIK3CA | chr3 | 179169418 | 179169418 | G > A | Change of SP1 binding |
| PIK3CA | chr3 | 179169418 | 179169418 | G > A | Change of SP3 binding |
| PIK3CA | chr3 | 179169418 | 179169418 | G > A | Change of SP4 binding |
| PIK3CA | chr3 | 179169418 | 179169418 | G > A | Change of ZBTB7A binding |
| PIK3CA | chr3 | 179169418 | 179169418 | G > A | Change of ZBTB7B binding |
| PIK3CA | chr3 | 179169418 | 179169418 | G > A | Change of ZNF350 binding |
| PIK3CA | chr3 | 179169418 | 179169418 | G > A | Change of ZNF660 binding |
| PIK3CA | chr3 | 179169418 | 179169418 | G > A | Change of ZNF841 binding |
| PIN1 | chr19 | 9945179 | 9945179 | G > C | Gain of ZDHHC7 binding; |
| | | | | | Decreasing of enhancer |
| | | | | | activity |
| PITX1 | NA | NA | NA | Duplication | Gain of enhancer |
| PITX2 | chr4 | 111710169 | 111710169 | C > T | Decreasing of enhancer |
| | | | | | activity |
| PKLR | chr1 | 155271258 | 155271258 | T > C | Decreasing of enhancer |
| | | | | | activity |
| PLEK | chr2 | 68647095 | 68647095 | C > T | |
| PLG | chr6 | 161143608 | 161143608 | C > T | Increasing of enhancer |
| | | | | | activity |
| POLH, | chr6 | 43806609 | 43806609 | G > G | Increasing of enhancer |
| MRPS18A, | | | | | activity |
| VEGFA, | | | | | |
| MAD2L1BP, | | | | | |
| RSPH9, | | | | | |
| GTPBP2, | | | | | |
| CAPN11, | | | | | |
| ZNF318, | | | | | |
| MRPL14, | | | | | |
| TMEM63B, | | | | | |
| XPO5, | | | | | |
| HSP90AB1, | | | | | |
| NFKBIE, | | | | | |
| TMEM151B, | | | | | |
| CDC5L, | | | | | |
| SLC29A1, | | | | | |
| DLK2, TJAP1 | | | | | |
| POU3F4 | chrX | 81727184 | 81731085 | Deletion | Loss of enhancer |
| POU3F4 | chrX | 81840528 | 81844429 | Deletion | Loss of enhancer |
| POU5F1B | chr8 | 128407443 | 128407443 | A > G | Decreasing of enhancer |
| | | | | | activity |
| POU5F1B | chr8 | 128413305 | 128413305 | G > T | Decreasing of enhancer |
| | | | | | activity |
| POU5F1B | chr8 | 128424792 | 128424792 | A > G | Decreasing of enhancer |
| | | | | | activity |
| PPARG | chr3 | 12386337 | 12386337 | | |
| PPM1N | chr19 | 45981772 | 45981772 | C > G | Change of CTCF binding |
| PPM1N | chr19 | 45981775 | 45981775 | G > T | Change of CTCF binding |
| PPM1N | chr19 | 45981772 | 45981772 | C > G | Change of CTCF binding |
| PPM1N | chr19 | 45981775 | 45981775 | G > T | Change of CTCF binding |
| PPM1N | chr19 | 45972294 | 45972294 | C > T | Change of CTCF binding |
| PPM1N | chr19 | 46319995 | 46319995 | G > T | Change of CTCF binding |
| PPM1N | chr19 | 45954137 | 45954137 | G > C | Change of SP4 binding |
| PPM1N | chr19 | 45954137 | 45954137 | G > C | Change of SP4 binding |
| PPM1N | chr19 | 45394224 | 45394224 | G > T | Change of SP4 binding |
| PPM1N | chr19 | 45394538 | 45394538 | G > T | Change of SP4 binding |
| PPM1N | chr19 | 45394627 | 45394627 | G > C | Change of SP4 binding |
| PPM1N | chr19 | 45942991 | 45942991 | C > T | Change of SP4 binding |
| PPM1N | chr19 | 45349271 | 45349271 | G > A | Change of SP4 binding |
| PPM1N | chr19 | 45349297 | 45349297 | C > A | Change of SP4 binding |
| PPM1N | chr19 | 45811530 | 45811530 | T > G | Change of SP4 binding |
| PPP3CA | | NA | NA | | Gain of enhancer |
| PPP3CA | | NA | NA | | Gain of enhancer |
| PPP3CA | | NA | NA | | Gain of enhancer |
| PPP3CA | | NA | NA | | Gain of enhancer |
| PPP3CA | | NA | NA | | Gain of enhancer |
| PPP3CA | | NA | NA | | Gain of enhancer |
| PPP3CA | | NA | NA | | Gain of enhancer |
| PPP3CA | | NA | NA | | Gain of enhancer |
| PPP3CA | | NA | NA | | Gain of enhancer |
| PPP3CA | | NA | NA | | Gain of enhancer |
| PPP3CA | | NA | NA | | Gain of enhancer |
| PPP3CA | | NA | NA | | Gain of enhancer |
| PPP3CA | | NA | NA | | Gain of enhancer |
| PPP3CA | | NA | NA | | Gain of enhancer |
| PPP4R1L, | chr20 | 57469073 | 57469073 | T > T | Increasing of enhancer |
| ATP5E, | | | | | activity |
| NPEPL1, | | | | | |
| STX16, | | | | | |
| RAB22A, | | | | | |
| GNAS, VAPB, | | | | | |
| AURKA, | | | | | |
| SLMO2, | | | | | |
| TH1L, CTSZ | | | | | |
| PREX1 | chr20 | 47375521 | 47375521 | C > T | Change of EGR4 binding |
| PREX1 | chr20 | 47375521 | 47375521 | C > T | Change of EGR4 binding |
| PREX1 | chr20 | 47120374 | 47120374 | C > A | Change of EGR4 binding |
| PRKCA | chr17 | 64306133 | 64306133 | T > C | Decreasing of TF binding; |
| | | | | | Decreasing of enhancer |
| | | | | | activity |
| PROP1 | chr5 | 177421909 | 177421909 | delATG | Decreasing of enhancer |
| | | | | | activity |
| PROP1 | chr5 | 177422391 | 177422391 | G > A | Decreasing of enhancer |
| | | | | | activity |
| PRPF40A | chr2 | 113978940 | 113978940 | C > G | Increasing of enhancer |
| | | | | | activity |
| PRRX1 | chr1 | 170587340 | 170587340 | C > T | Increasing of enhancer |
| | | | | | activity |
| PSEN1 | chr14 | 73602899 | 73602899 | C > G | Gain of TBX20 binding; |
| | | | | | Decreasing of enhancer |
| | | | | | activity |
| PTCHD1 | | NA | NA | | Gain of enhancer |
| PTCHD1 | | NA | NA | | Gain of enhancer |
| PTCHD1 | | NA | NA | | Gain of enhancer |
| PTCHD1 | | NA | NA | | Gain of enhancer |
| PTCHD1 | | NA | NA | | Gain of enhancer |
| PTCHD1 | | NA | NA | | Gain of enhancer |
| PTCHD1 | | NA | NA | | Gain of enhancer |
| PTCHD1 | | NA | NA | | Gain of enhancer |
| PTCHD1 | | NA | NA | | Gain of enhancer |
| PTCHD1 | | NA | NA | | Gain of enhancer |
| PTCHD1 | | NA | NA | | Gain of enhancer |
| PTEN | chr10 | 89622988 | 89622988 | A > G | Decreasing of enhancer |
| | | | | | activity |
| PTEN | chr10 | 89623392 | 89623392 | C > T | Decreasing of enhancer |
| | | | | | activity |
| PTEN | chr10 | 89623462 | 89623462 | A > G | Decreasing of enhancer |
| | | | | | activity |
| PTEN | chr10 | 89872831 | 89872831 | G > A | Change of PPARG binding |
| PTEN | chr10 | 89913137 | 89913137 | T > C | Change of GATA5 binding |
| PTEN | chr10 | 89913137 | 89913137 | T > C | Change of HNF1B binding |
| PTEN | chr10 | 89938170 | 89938170 | C > A | Change of ZNF274 binding |
| PTEN | chr10 | 90146219 | 90146219 | C > T | Change of ZSCAN5C binding |
| PTEN | chr17 | 5519006 | 5519006 | A > G | |
| PTF1A | chr10 | 23508305 | 23508305 | A > G | Loss of FOXA2 motif; Loss of |
| | | | | | enhancer |
| PTF1A | chr10 | 23508363 | 23508363 | A > G | Loss of FOXA2 motif; Loss of |
| | | | | | enhancer |
| PTF1A | chr10 | 23508363 | 23508363 | A > G | Loss of FOXA2 motif; Loss of |
| | | | | | enhancer |
| PTF1A | chr10 | 23508365 | 23508365 | A > G | Loss of enhancer |
| PTF1A | chr10 | 23508437 | 23508437 | A > G | Loss of FOXA2 motif; Loss of |
| | | | | | enhancer |
| PTF1A | chr10 | 23508446 | 23508446 | A > C | Loss of PDX1 motif; Loss of |
| | | | | | enhancer |
| PTF1A | chr10 | 23508446 | 23508446 | A > C | Loss of PDX1 motif; Loss of |
| | | | | | enhancer |
| PTK2B, CLU, | chr8 | 27456253 | 27456253 | A > G | Loss of HSF1 binding; |
| EPHX2 | | | | | Increasing of enhancer |
| | | | | | activity |
| PVT1 | chr8 | 129106383 | 129106383 | | |
| PVT1 | chr8 | 128323819 | 128323819 | A > G | Decreasing of YYl binding; |
| | | | | | Increasing of enhancer |
| | | | | | activity |
| RAB22A | chr20 | 56942557 | 56942557 | A > G | Increasing of enhancer |
| | | | | | activity |
| RAD21 | chr8 | 117778780 | 117778780 | G > A | Change of HES4 binding |
| RAD21 | chr8 | 117778780 | 117778780 | G > A | Change of NPAS3 binding |
| RAD21 | chr8 | 117778780 | 117778780 | G > A | Change of TFCP2 binding |
| RAD21 | chr8 | 117778780 | 117778780 | G > A | Change of ZNF677 binding |
| RAD21 | chr8 | 118742743 | 118742743 | G > A | Change of LMO2 binding |
| RAD21 | chr8 | 118742743 | 118742743 | G > A | Change of NHLH2 binding |
| RAD21 | chr8 | 118742743 | 118742743 | G > A | Change of SZF1 binding |
| RAD21 | chr8 | 118742743 | 118742743 | G > A | Change of ZEB1 binding |
| RAD21 | chr8 | 118742743 | 118742743 | G > A | Change of ZNF367 binding |
| RAD21 | chr8 | 118743315 | 118743315 | A > G | Change of FOXP4 binding |
| RAD21 | chr8 | 118743315 | 118743315 | A > G | Change of HDAC2 binding |
| RAD21 | chr8 | 118743315 | 118743315 | A > G | Change of IRF4 binding |
| RAD21 | chr8 | 118743315 | 118743315 | A > G | Change of ZNF569 binding |
| RAD21 | chr8 | 118744058 | 118744058 | T > G | Change of EGR2 binding |
| RAD21 | chr8 | 118744058 | 118744058 | T > G | Change of EGR3 binding |
| RAD21 | chr8 | 118744058 | 118744058 | T > G | Change of EGR4 binding |
| RAD21 | chr8 | 118744058 | 118744058 | T > G | Change of GLI1 binding |
| RAD21 | chr8 | 118744058 | 118744058 | T > G | Change of GLI2 binding |
| RAD50 | chr5 | 131826021 | 131826021 | C > G | Change of EGR4 binding |
| RAD50 | chr5 | 131838005 | 131838005 | G > T | Change of HIVEP3 binding |
| RAD50 | chr5 | 131838005 | 131838005 | G > T | Change of RP58 binding |
| RAD50 | chr5 | 131838005 | 131838005 | G > T | Change of TP63 binding |
| RAD50 | chr5 | 131838005 | 131838005 | G > T | Change of ZFP64 binding |
| RAD50 | chr5 | 131838131 | 131838131 | G > T | Change of NR3C1 binding |
| RAD50 | chr5 | 131838131 | 131838131 | G > T | Change of YYl binding |
| RAD50 | chr5 | 131892812 | 131892812 | T > G | Change of PTF1A binding |
| RAD50 | chr5 | 131892812 | 131892812 | T > G | Change of ZNF721 binding |
| RAD50 | chr5 | 131898457 | 131898457 | G > A | Change of ZNF280B binding |
| RAD50 | chr5 | 132109775 | 132109775 | G > A | Change of ESRRA binding |
| RAD50 | chr5 | 132110041 | 132110041 | G > C | Change of TBX20 binding |
| RAD51C | chr17 | 56012996 | 56012996 | G > C | Change of PAX5 binding |
| RAD51C | chr17 | 56012996 | 56012996 | G > C | Change of SPI1 binding |
| RAD51C | chr17 | 56012996 | 56012996 | G > C | Change of STAT1 binding |
| RAD51C | chr17 | 56405056 | 56405056 | C > T | Change of ZNF93 binding |
| RAD51C | chr17 | 56491423 | 56491423 | T > G | Change of ZNF567 binding |
| RAD51C | chr17 | 56491423 | 56491423 | T > G | Change of ZNF605 binding |
| RAD51C | chr17 | 56565448 | 56565448 | G > C | Change of EGR1 binding |
| RAD51C | chr17 | 56565448 | 56565448 | G > C | Change of EGR4 binding |
| RAD51C | chr17 | 56565448 | 56565448 | G > C | Change of PAX5 binding |
| RAD51C | chr17 | 56565448 | 56565448 | G > C | Change of SP1 binding |
| RAD51C | chr17 | 56565448 | 56565448 | G > C | Change of SP3 binding |
| RAD51C | chr17 | 56565448 | 56565448 | G > C | Change of SP4 binding |
| RAD51C | chr17 | 56565448 | 56565448 | G > C | Change of ZNF236 binding |
| RAD51C | chr17 | 56565448 | 56565448 | G > C | Change of ZNF350 binding |
| RAD51C | chr17 | 56565448 | 56565448 | G > C | Change of ZNF647 binding |
| RAD51C | chr17 | 56686893 | 56686893 | C > T | Change of TP63 binding |
| RAD51C | chr17 | 56686893 | 56686893 | C > T | Change of ZNF302 binding |
| RAD51C | chr17 | 56686893 | 56686893 | C > T | Change of ZNF679 binding |
| RAD51C | chr17 | 56687036 | 56687036 | C > G | Change of AR binding |
| RAD51C | chr17 | 56687036 | 56687036 | C > G | Change of ESR1 binding |
| RAD51C | chr17 | 56687036 | 56687036 | C > G | Change of ESR2 binding |
| RAD51C | chr17 | 56687036 | 56687036 | C > G | Change of ESRRA binding |
| RAD51C | chr17 | 56727563 | 56727563 | C > T | Change of ARNT2 binding |
| RAD51C | chr17 | 56727563 | 56727563 | C > T | Change ofZBTB11 binding |
| RAD51C | chr17 | 56819395 | 56819395 | A > T | Change of NR3C1 binding |
| RAD51C | chr17 | 56819395 | 56819395 | A > T | Change of THAP1 binding |
| RAD51C | chr17 | 56819395 | 56819395 | A > T | Change of YYl binding |
| RAD51C | chr17 | 56841079 | 56841079 | T > A | Change of ZNF136 binding |
| RAD51C | chr17 | 57030283 | 57030283 | C > G | Change of PAX5 binding |
| RAD51C | chr17 | 57030283 | 57030283 | C > G | Change of ZNF430 binding |
| RAD51C | chr17 | 57030283 | 57030283 | C > G | Change of ZNF658B binding |
| RAD51C | chr17 | 57030283 | 57030283 | C > G | Change of ZNF658 binding |
| RAD51C | chr17 | 57030283 | 57030283 | C > G | Change of ZNF709 binding |
| RAD51C | chr17 | 57232982 | 57232982 | G > C | Change of GFIl binding |
| RAD51C | chr17 | 57232982 | 57232982 | G > C | Change of NFYB binding |
| RAD51C | chr17 | 57287378 | 57287378 | A > C | Change of ELK1 binding |
| RAD51C | chr17 | 57288400 | 57288400 | C > A | Change of ZNF493 binding |
| RAD51C | chr17 | 57923238 | 57923238 | A > C | Change of PPARG binding |
| RAD51C | chr17 | 57923238 | 57923238 | A > C | Change of RXRA binding |
| RAD51C | chr17 | 57923418 | 57923418 | G > C | Change of JUN binding |
| RALY | chr20 | 32605327 | 32605327 | G > C | |
| RALY | chr20 | 32610401 | 32610401 | C > T | |
| RALY | chr20 | 32648738 | 32648738 | G > A | |
| RALY | chr20 | 32649064 | 32649064 | A > G | |
| RALY | chr20 | 32655741 | 32655741 | G > A | |
| RALY | chr20 | 32656841 | 32656841 | C > G | |
| RALY | chr20 | 32654562 | 32654562 | C > A | |
| RALY | chr20 | 32657378 | 32657378 | C > T | |
| RARG | chr12 | 53614168 | 53614168 | G > A | Change of ZNF263 binding |
| RARG | chr12 | 53614182 | 53614182 | T > G | Change of ZNF263 binding |
| RARG | chr12 | 53615417 | 53615417 | G > A | Change of ZNF263 binding |
| RARG | chr12 | 53689776 | 53689776 | C > T | Change of ZNF263 binding |
| RARG | chr12 | 53765398 | 53765398 | C > T | Change of ZNF263 binding |
| RASA2, | chr3 | 141807137 | 141807137 | C > C | Increasing of enhancer |
| ATP1B3, | | | | | activity |
| TFDP2, | | | | | |
| XRN1, RNF7, | | | | | |
| GK5, ATR | | | | | |
| RB1 | chr13 | 47128005 | 47128005 | G > A | Change ofCTCF binding |
| RB1 | chr13 | 47128005 | 47128005 | G > A | Change of RXRA binding |
| RB1 | chr13 | 47128005 | 47128005 | G > A | Change of ZBTB7B binding |
| RB1 | chr13 | 48611842 | 48611842 | C > A | Change of ELF2 binding |
| RB1 | chr13 | 48611842 | 48611842 | C > A | Change of ETV7 binding |
| RB1 | chr13 | 48611842 | 48611842 | C > A | Change of FLU binding |
| RB1 | chr13 | 48668171 | 48668171 | T > C | Change of ZNF689 binding |
| RB1 | chr13 | 48669381 | 48669381 | G > T | Change of CTCF binding |
| RB1 | chr13 | 48669381 | 48669381 | G > T | Change of CTCFL binding |
| RB1 | chr13 | 48669381 | 48669381 | G > T | Change of RAD21 binding |
| RB1 | chr13 | 48669381 | 48669381 | G > T | Change of RXRA binding |
| RB1 | chr13 | 48669381 | 48669381 | G > T | Change of SMC3 binding |
| RB1 | chr13 | 48669381 | 48669381 | G > T | Change of YYl binding |
| RB1 | chr13 | 48669381 | 48669381 | G > T | Change of ZFP binding |
| RB1 | chr13 | 48669381 | 48669381 | G > T | Change of ZNF778 binding |
| RB1 | chr13 | 49067569 | 49067569 | G > T | Change of ZAC binding |
| RB1 | chr13 | 50656563 | 50656563 | G > A | Change of DMRT1 binding |
| RB1 | chr13 | 50656563 | 50656563 | G > A | Change of DMRT3 binding |
| RB1 | chr13 | 50656563 | 50656563 | G > A | Change of DMRTA2 binding |
| RBPJ | chr4 | 26085480 | 26085480 | A > G | Increasing of enhancer |
| | | | | | activity |
| RET | NA | NA | NA | Deletion | Loss of enhancer |
| RET | chr10 | 43581812 | 43582711 | | |
| RET | chr10 | 43582056 | 43582056 | C > T | Decreasing of enhancer |
| | | | | | activity |
| RET | chr10 | 43582056 | 43582056 | C > T | Decreasing of enhancer |
| | | | | | activity |
| RET | chr10 | 43582056 | 43582056 | C > T | Loss of SOX10 motif; |
| | | | | | Decreasing of enhancer |
| | | | | | activity |
| RET | chr10 | 43447847 | 43447847 | A > G | Decreasing of enhancer |
| | | | | | activity |
| RET | chr10 | 43447847 | 43447847 | A > G | Loss of RARB motif; |
| | | | | | Decreasing of enhancer |
| | | | | | activity |
| RET | chr10 | 43552895 | 43552895 | C > T | Loss of GATA2 motif; |
| | | | | | Decreasing of enhancer |
| | | | | | activity |
| RFX6 | chr6 | 117210052 | 117210052 | C > T | Gain of HOXB13 motif; |
| | | | | | Increasing of HOXB13 |
| | | | | | binding; Increasing of |
| | | | | | enhancer activity |
| RFX6 | chr6 | 117210052 | 117210052 | C > T | Increasing of HOXB13 |
| | | | | | binding; Increasing of |
| | | | | | enhancer activity |
| RGS1 | chr1 | 192535107 | 192535107 | A > C | |
| RICTOR, FYB, | chr5 | 39397132 | 39397132 | T > A | Increasing of enhancer |
| TTC33, | | | | | activity |
| PRKAA1, | | | | | |
| RPL37, DAB2 | | | | | |
| RP11 | chr1 | 98497176 | 98497176 | A > C | Decreasing of enhancer |
| 490G2.2 | | | | | activity |
| RPS6KA4, | chr11 | 64464085 | 64464085 | T > A | Increasing of enhancer |
| SF1, | | | | | activity |
| SLC22A11, | | | | | |
| SNX15, | | | | | |
| MAP4K2, | | | | | |
| PYGM, | | | | | |
| MEN1, | | | | | |
| NRXN2, | | | | | |
| RASGRP2, | | | | | |
| EHD1, ZFPL1, | | | | | |
| ATG2A, | | | | | |
| ARL2, | | | | | |
| TRMT112 | | | | | |
| RSBN1L, | chr7 | 77416439 | 77416439 | T > C | Increasing of enhancer |
| TMEM60, | | | | | activity |
| PTPN12, | | | | | |
| PION, PHTF2 | | | | | |
| SARDH | chr9 | 136536633 | 136536633 | A > G | |
| SCAMP3, | chr1 | 155194980 | 155194980 | T > T | Increasing of enhancer |
| RUSC1, | | | | | activity |
| FAM189B, | | | | | |
| ADAR, | | | | | |
| LENEP, GBA, | | | | | |
| FLAD1, CLK2, | | | | | |
| ZBTB7B, | | | | | |
| FDPS, MUC1, | | | | | |
| C1orf104, | | | | | |
| MIR555, | | | | | |
| ADAM15, | | | | | |
| HCN3, | | | | | |
| YY1AP1, | | | | | |
| PKLR, DAP3, | | | | | |
| DPM3, | | | | | |
| EFNA1, | | | | | |
| RAG1AP1, | | | | | |
| THBS3, | | | | | |
| KRTCAP2, | | | | | |
| TRIM46, | | | | | |
| CKS1B, | | | | | |
| EFNA3, | | | | | |
| LOC645676, | | | | | |
| ASHIL, | | | | | |
| MSTO1, | | | | | |
| GBAP, | | | | | |
| EFNA4, | | | | | |
| PBXIP1, | | | | | |
| PMVK, | | | | | |
| MTX1, | | | | | |
| PYGO2, SHC1 | | | | | |
| SCG2 | chr2 | 224466344 | 224466344 | C > T | Increasing of enhancer |
| | | | | | activity |
| SCGB3A2 | chr5 | 147258162 | 147258162 | G > A | Decreasing of enhancer |
| | | | | | activity |
| SDCCAG8 | chr1 | 243639859 | 243639859 | A > G | Decreasing of enhancer |
| | | | | | activity |
| SERCA2B | chr12 | 110718411 | 110718411 | G > T | Decreasing of enhancer |
| | | | | | activity |
| SERPINC1 | chr1 | 173886568 | 173886568 | G > C | Decreasing of enhancer |
| | | | | | activity |
| SHF, | chr15 | 45641225 | 45641225 | C > C | Increasing of enhancer |
| SPATA5L1, | | | | | activity |
| MIR147B, | | | | | |
| C15orf21, | | | | | |
| SLC30A4, | | | | | |
| SQRDL, | | | | | |
| SLC28A2, | | | | | |
| GATM, SORD | | | | | |
| SHH | chr7 | 156143386 | 156732204 | Duplication | Gain of enhancer |
| SHH | chr7 | 156241020 | 156619399 | Duplication | Gain of enhancer |
| SHH | chr7 | 156241020 | 156677759 | Duplication | Gain of enhancer |
| SHH | chr7 | 156241020 | 156699998 | Duplication | Gain of enhancer |
| SHH | chr7 | 156354085 | 156619399 | Duplication | Gain of enhancer |
| SHH | chr7 | 156354085 | 156687613 | Duplication | Gain of enhancer |
| SHH | chr7 | 156368541 | 156661877 | Duplication | Gain of enhancer |
| SHH | chr7 | 156539605 | 156699998 | Duplication | Gain of enhancer |
| SHH | chr7 | 156547469 | 156644074 | Duplication | Gain of enhancer |
| SHH | chr7 | 156572751 | 156661877 | Duplication | Gain of enhancer |
| SHH | NA | NA | NA | t(5, 7) (q11, q36) | |
| SHH | NA | NA | NA | inv(7) | Enhancer hijacking; Loss of |
| | | | | (q22.1; q36.3) | intrinsic enhancer; Gain of |
| | | | | | new enhancer |
| SHH | chr1 | 106934 | 106934 | | Gain of enhancer |
| SHH | chr7 | 156583831 | 156583831 | A > G | Gain of ELK4; REL; GMEB1; |
| | | | | | KLF3; ELF3; ELK1; ETV1 |
| | | | | | binding; Increasing of |
| | | | | | enhancer activity |
| SHH | chr7 | 156583831 | 156583831 | A > G | |
| SHH | chr7 | 156583949 | 156583949 | C > G | Gain of REL; GMEB1; KLF3 |
| | | | | | binding; Increasing of |
| | | | | | enhancer activity |
| SHH | chr7 | 156583949 | 156583949 | C > G | |
| SHH | chr7 | 156583951 | 156583951 | C > T | Gain of GMEB1 binding; |
| | | | | | Increasing of enhancer |
| | | | | | activity |
| SHH | chr7 | 156584107 | 156584107 | T > G | Gain of HOXC10; CDX2 |
| | | | | | binding; Increasing of |
| | | | | | enhancer activity |
| SHH | chr7 | 156584107 | 156584107 | T > G | |
| SHH | chr7 | 156584166 | 156584166 | G > A | Gain of HOXD10 binding; |
| | | | | | Increasing of enhancer |
| | | | | | activity |
| SHH | chr7 | 156584166 | 156584166 | G > C | Gain of HOXD10 binding; |
| | | | | | Increasing of enhancer |
| | | | | | activity |
| SHH | chr7 | 156584166 | 156584166 | G > C | |
| SHH | chr7 | 156584166 | 156584166 | G > A | |
| SHH | chr7 | 156584174 | 156584174 | C > T | Increasing of enhancer |
| | | | | | activity |
| SHH | chr7 | 156584174 | 156584174 | C > T | |
| SHH | chr7 | 156584236 | 156584236 | T > G | |
| SHH | chr7 | 156584241 | 156584241 | T > C | Gain of TCF21; MSC; BNC1 |
| | | | | | binding; Increasing of |
| | | | | | enhancer activity |
| SHH | chr7 | 156584241 | 156584241 | T > C | |
| SHH | chr7 | 156584266 | 156584266 | A > T | |
| SHH | chr7 | 156584273 | 156584273 | G > A | |
| SHH | chr7 | 156584275 | 156584275 | T > C | |
| SHH | chr7 | 156584465 | 156584465 | C > G | Gain of TFAP2A; TFAP2E; |
| | | | | | TFAP2B binding; Increasing of |
| | | | | | enhancer activity |
| SHH | chr7 | 156584465 | 156584465 | C > G | |
| SHOX | NA | NA | NA | Deletion | Loss of enhancer |
| SHOX | NA | NA | NA | Deletion | Loss of enhancer |
| SHOX | chrX | 398357 | 835529 | Amplification | Gain of enhancer |
| SIX6 | chr14 | 60974449 | 60974449 | A > G | Gain of enhancer activity |
| SIX6 | chr14 | 60974427 | 60974430 | | Loss of enhancer |
| SLC14A2, | chr18 | 43187130 | 43187130 | A > A | Increasing of enhancer |
| SLC14A1 | | | | | activity |
| SLC1A2 | chr11 | 35440976 | 35440976 | T > G | Gain of WT1; SMAD4 binding; |
| | | | | | Decreasing of enhancer |
| | | | | | activity |
| SLC25A37, | chr8 | 23751151 | 23751151 | C > T | Increasing of enhancer |
| NKX3-1, | | | | | activity |
| ENTPD4, | | | | | |
| STC1, | | | | | |
| ADAM7 | | | | | |
| SLC26A4 | chr7 | 107301201 | 107301201 | T > C | Gain of GMEB1; SMAD4 |
| | | | | | binding; Decreasing of |
| | | | | | enhancer activity |
| SLC37A4 | chr11 | 118900338 | 118900338 | G > A | Decreasing of enhancer |
| | | | | | activity |
| SLC4A7 | chr3 | 27548900 | 27548900 | C > T | Increasing of c-Fos binding; |
| | | | | | Increasing of enhancer |
| | | | | | activity |
| SLC6A4 | chr17 | 28564170 | 28564170 | A > G | Increasing of enhancer |
| | | | | | activity |
| SMAD2 | chr18 | 45446307 | 45446307 | A > G | Decreasing of enhancer |
| | | | | | activity |
| SMAD3 | chr15 | 67442596 | 67442596 | C > T | Loss of AP-1 motif; |
| | | | | | Decreasing of enhancer |
| | | | | | activity |
| SMAD7 | chr18 | 46449565 | 46449565 | C > G | Decreasing of enhancer |
| | | | | | activity |
| SMAD7 | chr18 | 46448805 | 46448805 | C > T | Decreasing of enhancer |
| | | | | | activity |
| SMAD7 | chr18 | 46448819 | 46448819 | G > C | Decreasing of enhancer |
| | | | | | activity |
| SMAD7 | chr18 | 46449111 | 46449111 | T > C | Decreasing of enhancer |
| | | | | | activity |
| SMARCA1 | | NA | NA | | Gain of enhancer |
| SMARCA1 | | NA | NA | | Gain of enhancer |
| SMARCA1 | | NA | NA | | Gain of enhancer |
| SMARCA1 | | NA | NA | | Gain of enhancer |
| SMARCA1 | | NA | NA | | Gain of enhancer |
| SMARCA1 | | NA | NA | | Gain of enhancer |
| SMARCA1 | | NA | NA | | Gain of enhancer |
| SMARCA1 | | NA | NA | | Gain of enhancer |
| SMARCA1 | | NA | NA | | Gain of enhancer |
| SMARCA1 | | NA | NA | | Gain of enhancer |
| SMARCA1 | | NA | NA | | Gain of enhancer |
| SMARCA1 | | NA | NA | | Gain of enhancer |
| SMARCA1 | | NA | NA | | Gain of enhancer |
| SMARCA1 | | NA | NA | | Gain of enhancer |
| SMARCD1 | chr12 | 50451445 | 50451445 | C > G | Change of EGR4 binding |
| SMARCD1 | chr12 | 50451445 | 50451445 | C > G | Change of HDAC2 binding |
| SMARCD1 | chr12 | 50451445 | 50451445 | C > G | Change of REST binding |
| SMARCD1 | chr12 | 50451445 | 50451445 | C > G | Change of SP4 binding |
| SNCA | chr4 | 90674431 | 90674431 | G > A | Increasing of EMX2; NKX6-1 |
| | | | | | binding; Increasing of |
| | | | | | enhancer activity |
| SNHG5 | chr6 | 86246709 | 86246709 | A > C | Decreasing of enhancer |
| | | | | | activity |
| SNHG5 | chr6 | 86246709 | 86246709 | A > C | Decreasing of enhancer |
| | | | | | activity |
| SNHG5 | chr6 | 86223316 | 86223316 | C > T | Decreasing of enhancer |
| | | | | | activity |
| SNHG5 | chr6 | 86223316 | 86223316 | C > T | Decreasing of enhancer |
| | | | | | activity |
| SNHG5 | chr6 | 86258614 | 86258614 | A > G | Decreasing of enhancer |
| | | | | | activity |
| SNHG5 | chr6 | 86258614 | 86258614 | A > G | Decreasing of enhancer |
| | | | | | activity |
| SNHG5 | chr6 | 86224053 | 86224053 | G > T | Decreasing of enhancer |
| | | | | | activity |
| SNHG5 | chr6 | 86224053 | 86224053 | G > T | Decreasing of enhancer |
| | | | | | activity |
| SNHG5 | chr6 | 86205323 | 86205323 | G > T | Decreasing of enhancer |
| | | | | | activity |
| SNHG5 | chr6 | 86205323 | 86205323 | G > T | Decreasing of enhancer |
| | | | | | activity |
| SNHG5 | chr6 | 86247799 | 86247799 | C > T | Decreasing of enhancer |
| | | | | | activity |
| SNHG5 | chr6 | 86247799 | 86247799 | C > T | Decreasing of enhancer |
| | | | | | activity |
| SOD2, | chr6 | 160668389 | 160668389 | A > G | Increasing of enhancer |
| SLC22A2, | | | | | activity |
| SLC22A1 | | | | | |
| SORT1 | chr1 | 109817590 | 109817590 | G > T | Gain of C/EBP motif; |
| | | | | | Increasing of enhancer |
| | | | | | activity |
| SOX10 | chr22 | 38412215 | 38412215 | G > A | Loss of TFAP2A motif; |
| | | | | | Decreasing of enhancer |
| | | | | | activity |
| SOX10 | chr22 | 38412781 | 38412781 | G > C | Decreasing of SOX10 binding; |
| | | | | | Decreasing of enhancer |
| | | | | | activity |
| SOX10 | chr22 | 38412423 | 38412423 | C > T | |
| SOX10 | chr22 | 38412323 | 38412323 | C > T | |
| SOX10 | chr22 | 38412402 | 38412402 | C > T | |
| SOX9 | chr17 | 68676303 | 68676303 | T > C | Gain of KLF3; HES1; HEY1; |
| | | | | | HEY2; HES5 binding; |
| | | | | | Decreasing of enhancer |
| | | | | | activity |
| SOX9 | chr17 | 68698977 | 68698977 | C > T | Loss of OCT1 motif; |
| | | | | | Decreasing of enhancer |
| | | | | | activity |
| SOX9 | chr17 | 68735530 | 68735530 | G > A | Decreasing of enhancer |
| | | | | | activity |
| SOX9 | chr17 | 68747322 | 68747322 | T > C | Loss of NFAT motif; |
| | | | | | Decreasing of enhancer |
| | | | | | activity |
| SOX9 | chr17 | 68772750 | 68772750 | G > A | Loss of CDP motif; Decreasing |
| | | | | | of enhancer activity |
| SOX9 | chr17 | 69706044 | 69706044 | A > C | Decreasing of enhancer |
| | | | | | activity |
| SOX9 | chr17 | 69108655 | 69108655 | A > G | Gain of AP-1 motif; Loss of |
| | | | | | FOXA1 |
| | | | | | motif; Increasing of |
| | | | | | enhancer activity |
| SOX9 | chr17 | 69108753 | 69108753 | T > G | Increasing of enhancer |
| | | | | | activity |
| SOX9 | chr17 | 69107816 | 69107816 | G > A | Gain of androgen receptor |
| | | | | | motif; Increasing of enhancer |
| | | | | | activity |
| SPCS1 | chr3 | 52804487 | 52804487 | T > C | Decreasing of enhancer |
| | | | | | activity |
| SPINK1 | chr5 | 147211221 | 147211221 | G > A | Gain of GMEB1; SMAD4 |
| | | | | | binding; Increasing of |
| | | | | | enhancer activity |
| SPINK1 | chr5 | 147211355 | 147211355 | C > T | Gain of MYF6 binding; |
| | | | | | Increasing of enhancer |
| | | | | | activity |
| SRCAP | chr16 | 30669784 | 30669784 | G > C | Change of ZNF263 binding |
| SRCAP | chr16 | 30723097 | 30723097 | G > A | Change of ZNF263 binding |
| SRCAP | chr16 | 30747922 | 30747922 | C > T | Change of ZNF263 binding |
| SRCAP | chr16 | 30753142 | 30753142 | C > T | Change of SP1 binding |
| SRCAP | chr16 | 30753142 | 30753142 | C > T | Change of SP1 binding |
| STARD10 | chr11 | 72470916 | 72470916 | Deletion | Gain of a GTTT repeat; |
| | | | | | Decreasing of enhancer |
| | | | | | activity |
| STAT3 | chr17 | 40507980 | 40507980 | A > C | |
| STUB1 | | NA | NA | | Gain of enhancer |
| STUB1 | | NA | NA | | Gain of enhancer |
| STUB1 | | NA | NA | | Gain of enhancer |
| STUB1 | | NA | NA | | Gain of enhancer |
| STUB1 | | NA | NA | | Gain of enhancer |
| STUB1 | | NA | NA | | Gain of enhancer |
| STUB1 | | NA | NA | | Gain of enhancer |
| STUB1 | | NA | NA | | Gain of enhancer |
| STUB1 | | NA | NA | | Gain of enhancer |
| STUB1 | | NA | NA | | Gain of enhancer |
| STUB1 | | NA | NA | | Gain of enhancer |
| STUB1 | | NA | NA | | Gain of enhancer |
| STUB1 | | NA | NA | | Gain of enhancer |
| SULF2 | chr20 | 46602388 | 46602388 | C > T | Change of EGR4 binding |
| SULF2 | chr20 | 46602388 | 46602388 | C > T | Change of MAZ binding |
| SULF2 | chr20 | 46602388 | 46602388 | C > T | Change of SP1 binding |
| SULF2 | chr20 | 46602388 | 46602388 | C > T | Change of SP3 binding |
| SULF2 | chr20 | 46602388 | 46602388 | C > T | Change of SP4 binding |
| SULF2 | chr20 | 46602388 | 46602388 | C > T | Change of ZBTB7B binding |
| SULF2 | chr20 | 46602388 | 46602388 | C > T | Change of ZNF263 binding |
| SULF2 | chr20 | 46602388 | 46602388 | C > T | Change of ZNF658B binding |
| SULF2 | chr20 | 46603160 | 46603160 | C > T | Change of ZNF263 binding |
| SULF2 | chr20 | 46618545 | 46618545 | C > G | Change of ZNF263 binding |
| SULF2 | chr20 | 46618545 | 46618545 | C > G | Change of ZNF263 binding |
| SULF2 | chr20 | 52748710 | 52748710 | C > T | Change of ZNF263 binding |
| SULF2 | chr20 | 46602388 | 46602388 | C > T | Change of EGR4 binding |
| SULF2 | chr20 | 46602388 | 46602388 | C > T | Change of MAZ binding |
| SULF2 | chr20 | 46602388 | 46602388 | C > T | Change of SP1 binding |
| SULF2 | chr20 | 46602388 | 46602388 | C > T | Change of SP3 binding |
| SULF2 | chr20 | 46602388 | 46602388 | C > T | Change of SP4 binding |
| SULF2 | chr20 | 46602388 | 46602388 | C > T | Change of ZBTB7B binding |
| SULF2 | chr20 | 46602388 | 46602388 | C > T | Change of ZNF263 binding |
| SULF2 | chr20 | 46602388 | 46602388 | C > T | Change of ZNF658B binding |
| SULF2 | chr20 | 46472698 | 46472698 | T > G | Change of HOXC5 binding |
| SULF2 | chr20 | 46472698 | 46472698 | T > G | Change of MAZ binding |
| SULF2 | chr20 | 46472698 | 46472698 | T > G | Change of SP1 binding |
| SULF2 | chr20 | 46472698 | 46472698 | T > G | Change of ZBTB7B binding |
| SULF2 | chr20 | 46472698 | 46472698 | T > G | Change of ZNF263 binding |
| SULF2 | chr20 | 46472698 | 46472698 | T > G | Change of ZNF658B binding |
| SULF2 | chr20 | 46308627 | 46308627 | T > G | Change of EGR4 binding |
| SULF2 | chr20 | 46308627 | 46308627 | T > G | Change of MAZ binding |
| SULF2 | chr20 | 46308627 | 46308627 | T > G | Change of SP1 binding |
| SULF2 | chr20 | 46308627 | 46308627 | T > G | Change of SP3 binding |
| SULF2 | chr20 | 46308627 | 46308627 | T > G | Change of SP4 binding |
| SULF2 | chr20 | 46308627 | 46308627 | T > G | Change of ZBTB7B binding |
| SULF2 | chr20 | 46308627 | 46308627 | T > G | Change of ZNF263 binding |
| SULF2 | chr20 | 46308627 | 46308627 | T > G | Change of ZNF658B binding |
| SULF2 | chr20 | 46831426 | 46831426 | G > A | Change of EGR4 binding |
| SULF2 | chr20 | 46831426 | 46831426 | G > A | Change of SP3 binding |
| SULF2 | chr20 | 46831426 | 46831426 | G > A | Change of SP4 binding |
| SULF2 | chr20 | 46831426 | 46831426 | G > A | Change of ZNF263 binding |
| SULF2 | chr20 | 46779797 | 46779797 | G > C | Change of HOXC5 binding |
| SULF2 | chr20 | 46793997 | 46793997 | G > T | Change of HOXC5 binding |
| SULF2 | chr20 | 46800093 | 46800093 | G > A | Change of SP1 binding |
| SULF2 | chr20 | 46800093 | 46800093 | G > A | Change of SP4 binding |
| SULF2 | chr20 | 46800093 | 46800093 | G > A | Change of SP1 binding |
| SULF2 | chr20 | 46800093 | 46800093 | G > A | Change of SP4 binding |
| SULF2 | chr20 | 47364914 | 47364914 | G > C | Change of SP1 binding |
| SULF2 | chr20 | 47366010 | 47366010 | G > C | Change of SP1 binding |
| SULF2 | chr20 | 46688376 | 46688376 | C > G | Change of SP1 binding |
| SULF2 | chr20 | 45989659 | 45989659 | G > A | Change of SP1 binding |
| SULF2 | chr20 | 46182305 | 46182305 | A > C | Change of EGR4 binding |
| SULF2 | chr20 | 46182305 | 46182305 | A > C | Change of MAZ binding |
| SULF2 | chr20 | 46182305 | 46182305 | A > C | Change of SP3 binding |
| SULF2 | chr20 | 46182305 | 46182305 | A > C | Change of SP4 binding |
| SULF2 | chr20 | 46182305 | 46182305 | A > C | Change of ZBTB7B binding |
| SULF2 | chr20 | 52703188 | 52703188 | G > T | Change of ZNF658B binding |
| SULF2 | chr20 | 52703188 | 52703188 | G > T | Change of ZNF658B binding |
| SULF2 | chr20 | 46779797 | 46779797 | G > C | Change of HOXC5 binding |
| SULF2 | chr20 | 46779797 | 46779797 | G > C | Change of HOXC5 binding |
| SULF2 | chr20 | 46710095 | 46710095 | A > T | Change of HOXC5 binding |
| TAGAP | chr6 | 159521657 | 159564248 | Duplication | Gain of enhancer |
| TAGAP | chr6 | 159521657 | 159564248 | Duplication | Gain of enhancer |
| TAGAP | chr6 | 159521657 | 159564248 | Duplication | Gain of enhancer |
| TAGAP | chr6 | 159521657 | 159564248 | Duplication | Gain of enhancer |
| TAGAP | chr6 | 159521657 | 159564248 | Duplication | Gain of enhancer |
| TAGAP | chr6 | 159521657 | 159564248 | Duplication | Gain of enhancer |
| TAGAP | chr6 | 159521657 | 159564248 | Duplication | Gain of enhancer |
| TAGAP | chr6 | 159521657 | 159564248 | Tandem | Gain of enhancer |
| | | | | duplication | |
| TAL1 | chr1 | 47704954 | 47704983 | | Gain of MYB; CBP; RUNX1; |
| | | | | | GATA3 and TAL1 binding; |
| | | | | | Gain of enhancer |
| TAL1 | chr1 | 94555832 | 211935484 | Deletion | Gain of enhancer |
| TBL1X | | NA | NA | | Gain of enhancer |
| TBL1X | | NA | NA | | Gain of enhancer |
| TBL1X | | NA | NA | | Gain of enhancer |
| TBL1X | | NA | NA | | Gain of enhancer |
| TBL1X | | NA | NA | | Gain of enhancer |
| TBL1X | | NA | NA | | Gain of enhancer |
| TBL1X | | NA | NA | | Gain of enhancer |
| TBL1X | | NA | NA | | Gain of enhancer |
| TBL1X | | NA | NA | | Gain of enhancer |
| TBL1X | | NA | NA | | Gain of enhancer |
| TBL1X | | NA | NA | | Gain of enhancer |
| TBL1X | | NA | NA | | Gain of enhancer |
| TBL1X | | NA | NA | | Gain of enhancer |
| TBL1X | | NA | NA | | Gain of enhancer |
| TBL1X | | NA | NA | | Gain of enhancer |
| TBX1 | chr22 | 19743578 | 19743578 | C > T | Increasing of enhancer |
| | | | | | activity |
| TBX3 | chr12 | 115112467 | 115112467 | T > C | Change of E2F1 binding |
| TBX3 | chr12 | 115112467 | 115112467 | T > C | Change of REST binding |
| TBX3 | chr12 | 115112467 | 115112467 | T > C | Change of ZBTB7B binding |
| TBX3 | chr12 | 115112467 | 115112467 | T > C | Change of ZNF236 binding |
| TBX4, BCAS3, | chr17 | 59239221 | 59239221 | A > A | Increasing of enhancer |
| TBX2, NACA2 | | | | | activity |
| TBX5 | chr12 | 114704515 | 114704515 | G > T | Loss of enhancer |
| TBX5 | chr12 | 114704515 | 114704515 | G > T | Loss of enhancer |
| TCF21 | chr6 | 134214525 | 134214525 | G > C | Increasing of AP-1 binding; |
| | | | | | Increasing of enhancer |
| | | | | | activity |
| TCF7L2 | chr10 | 114808902 | 114808902 | G > T | Increasing of enhancer |
| | | | | | activity |
| TCF7L2 | chr10 | 114758349 | 114758349 | C > T | Increasing of enhancer |
| | | | | | activity |
| TCF7L2 | chr10 | 114758349 | 114758349 | C > T | Loss of HMGB1 binding; Gain |
| | | | | | of enhancer activity |
| TERT | chr5 | 1325104 | 1345104 | | Gain of enhancer |
| TERT | chr5 | 1325104 | 1345104 | | Gain of enhancer |
| TERT | chr5 | 1325104 | 1345104 | | Gain of enhancer |
| TERT | chr5 | 1286516 | 1286516 | T > G | Increasing of enhancer |
| | | | | | activity |
| TERT | chr5 | 1286516 | 1286516 | A > C | Increasing of enhancer |
| | | | | | activity |
| TERT | chr5 | 1287194 | 1287194 | T > C | Loss of Snail1 motif; |
| | | | | | Decreasing Snail1 binding; |
| | | | | | Increasing of enhancer |
| | | | | | activity |
| TERT | | NA | NA | | Gain of enhancer |
| TERT | | NA | NA | | Gain of enhancer |
| TERT | | NA | NA | | Gain of enhancer |
| TERT | | NA | NA | | Gain of enhancer |
| TERT | | NA | NA | | Gain of enhancer |
| TERT | | NA | NA | | Gain of enhancer |
| TERT | | NA | NA | | Gain of enhancer |
| TERT | | NA | NA | | Gain of enhancer |
| TERT | | NA | NA | | Gain of enhancer |
| TERT | | NA | NA | | Gain of enhancer |
| TERT | | NA | NA | | Gain of enhancer |
| TERT | | NA | NA | | Gain of enhancer |
| TFF1 | chr21 | 43796913 | 43796913 | A > T | Loss of Rad21 binding; |
| | | | | | Loss of |
| | | | | | enhancer |
| TFF1 | chr21 | 43796494 | 43796494 | C > G | Loss of ER-alpha binding; |
| | | | | | Loss |
| | | | | | of enhancer |
| TH | chr11 | 2193085 | 2193085 | A > T | Decreasing of enhancer |
| | | | | | activity |
| TH | chr11 | 2193086 | 2193086 | C > T | Decreasing of enhancer |
| | | | | | activity |
| TH | chr11 | 2193087 | 2193087 | G > A | Decreasing of enhancer |
| | | | | | activity |
| THRB | chr3 | 24204984 | 24204984 | C > T | |
| TNF | chr6 | 31542308 | 31542308 | T > C | |
| TNF | chr6 | 31542476 | 31542476 | C > A | |
| TNFAIP3 | chr6 | 138196066 | 138196066 | TT > A | |
| TNFAIP3 | chr6 | 138196066 | 138196066 | T > G | Loss of NF-CE∫B binding; |
| | | | | | Loss |
| | | | | | of enhancer activity |
| TNFRSF10A | chr8 | 23082971 | 23082971 | G > T | Gain of ZDHHC7; PLAGL1 |
| | | | | | binding; Decreasing of |
| | | | | | enhancer activity |
| TNFRSF1A | chr12 | 6440009 | 6440009 | T > C | |
| TOX2 | chr20 | 42568164 | 42568164 | C > T | |
| TOX3 | chr16 | 52586341 | 52586341 | A > G | Gain of TOX3 motif and CHD9 |
| | | | | | motif; Decreasing of |
| | | | | | enhancer activity |
| TOX3 | chr16 | 52599188 | 52599188 | C > T | Gain of FOXA1 binding; |
| | | | | | Gain |
| | | | | | of enhancer activity |
| TP53 | chr17 | 6938079 | 6938079 | A > G | Change of ZNF471 binding |
| TP53 | chr17 | 6939213 | 6939213 | C > A | Change of PAX5 binding |
| TP53 | chr17 | 6939213 | 6939213 | C > A | Change of ZNF672 binding |
| TP53 | chr17 | 7465409 | 7465409 | T > G | Change of GTF3C2 binding |
| TP53 | chr17 | 7465409 | 7465409 | T > G | Change of SP4 binding |
| TP53 | chr17 | 7465409 | 7465409 | T > G | Change ofZBTB11 binding |
| TP53 | chr17 | 7465409 | 7465409 | T > G | Change of ZBTB7B binding |
| TP53 | chr17 | 7465409 | 7465409 | T > G | Change of ZIC3 binding |
| TP53 | chr17 | 7465409 | 7465409 | T > G | Change of ZNF345 binding |
| TP53 | chr17 | 7534110 | 7534110 | G > A | Change of ZBTB38 binding |
| TP53 | chr17 | 7577498 | 7577498 | C > A | Change of RARB binding |
| TP53 | chr17 | 7577498 | 7577498 | C > A | Change of THRA binding |
| TP53 | chr17 | 7577580 | 7577580 | T > C | Change of SMARCC2 binding |
| TP53 | chr17 | 7577580 | 7577580 | T > C | Change of ZNF440 binding |
| TP53 | chr17 | 7578271 | 7578271 | T > C | Change of SP1 binding |
| TP53 | chr17 | 7578394 | 7578394 | T > C | Change of ZBTB41 binding |
| TP53 | chr17 | 7578394 | 7578394 | T > C | Change of ZNF180 binding |
| TP53 | chr17 | 7578394 | 7578394 | T > C | Change of ZNF436 binding |
| TP53 | chr17 | 7578394 | 7578394 | T > C | Change of ZNF880 binding |
| TP53 | chr17 | 7578478 | 7578478 | G > C | Change of EGR1 binding |
| TP53 | chr17 | 7578478 | 7578478 | G > C | Change of KLF16 binding |
| TP53 | chr17 | 7578478 | 7578478 | G > C | Change of POLR3A binding |
| TP53 | chr17 | 7578478 | 7578478 | G > C | Change of SP3 binding |
| TP53 | chr17 | 7578478 | 7578478 | G > C | Change of SP4 binding |
| TP53 | chr17 | 7578478 | 7578478 | G > C | Change of TBX21 binding |
| TP53 | chr17 | 7578478 | 7578478 | G > C | Change of WT1 binding |
| TP53 | chr17 | 7578478 | 7578478 | G > C | Change of ZFP2 binding |
| TP53 | chr17 | 7578478 | 7578478 | G > C | Change of ZNF729 binding |
| TP53 | chr17 | 7578796 | 7578796 | C > A | Change of CTCF binding |
| TP53 | chr17 | 7578796 | 7578796 | C > A | Change of RAD21 binding |
| TP53 | chr17 | 7578796 | 7578796 | C > A | Change of RXRA binding |
| TP53 | chr17 | 7578796 | 7578796 | C > A | Change of ZNF92 binding |
| TP53 | chr17 | 7578947 | 7578947 | C > T | Change of NHLH2 binding |
| TP53 | chr17 | 7578947 | 7578947 | C > T | Change of SREBF1 binding |
| TP53 | chr17 | 7579313 | 7579313 | G > C | Change of POU2F1 binding |
| TP53 | chr17 | 7579529 | 7579529 | C > T | Change of SOX9 binding |
| TP53 | chr17 | 7621215 | 7621215 | T > G | Change of ZN337 binding |
| TP53 | chr17 | 8023124 | 8023124 | C > T | Change of E2F4 binding |
| TP53 | chr17 | 8023124 | 8023124 | C > T | Change of HSF1 binding |
| TP53 | chr17 | 8023124 | 8023124 | C > T | Change of RBAK binding |
| TP53 | chr17 | 8026793 | 8026793 | C > T | Change of MAX binding |
| TP53 | chr17 | 8026793 | 8026793 | C > T | Change of ZNF790 binding |
| TPD52L3, | chr9 | 6365683 | 6365683 | A > C | Decreasing of enhancer |
| TMED6, | | | | | activity |
| JMJD2C | | | | | |
| TPTE | chr21 | 10816017 | 10816017 | G > C | Change of ZNF616 binding |
| TPTE | chr21 | 10816529 | 10816529 | A > G | Change of ZNF616 binding |
| TPTE | chr21 | 10813552 | 10813552 | G > A | Change of ZNF616 binding |
| TPTE | chr21 | 10814023 | 10814023 | A > G | Change of ZNF616 binding |
| TPTE | chr21 | 10814025 | 10814025 | G > T | Change of ZNF616 binding |
| TPTE | chr21 | 10814061 | 10814061 | G > T | Change of ZNF616 binding |
| TPTE | chr21 | 10814155 | 10814155 | G > T | Change of ZNF616 binding |
| TPTE | chr21 | 10814716 | 10814716 | G > T | Change of ZNF616 binding |
| TPTE | chr21 | 10832792 | 10832792 | G > T | Change of ZNF616 binding |
| TPTE | chr21 | 10833977 | 10833977 | G > A | Change of ZNF616 binding |
| TPTE | chr21 | 10833990 | 10833990 | T > C | Change of ZNF616 binding |
| TPTE | chr21 | 10834357 | 10834357 | G > A | Change of ZNF616 binding |
| TPTE | chr21 | 10851202 | 10851202 | A > G | Change of ZNF616 binding |
| TPTE | chr21 | 10853066 | 10853066 | T > G | Change of ZNF616 binding |
| TPTE | chr21 | 10820450 | 10820450 | G > C | Change of ZNF616 binding |
| TPTE | chr21 | 10796504 | 10796504 | G > T | Change of ZNF616 binding |
| TPTE | chr21 | 10849949 | 10849949 | G > A | Change of ZNF616 binding |
| TPTE | chr21 | 10850097 | 10850097 | T > A | Change of ZNF616 binding |
| TPTE | chr21 | 10851202 | 10851202 | A > G | Change of ZNF616 binding |
| TPTE | chr21 | 10845180 | 10845180 | G > T | Change of ZNF616 binding |
| TPTE | chr21 | 10845749 | 10845749 | G > C | Change of ZNF616 binding |
| TPTE | chr21 | 10780021 | 10780021 | G > T | Change of ZNF616 binding |
| TPTE | chr21 | 10830716 | 10830716 | G > A | Change of ZNF616 binding |
| TPTE | chr21 | 10831264 | 10831264 | T > C | Change of ZNF616 binding |
| TRABD | chr22 | 50627834 | 50627834 | C > T | Change of PLAG1 binding |
| TRABD | chr22 | 50714820 | 50714820 | T > A | Change of PLAG1 binding |
| TRABD | chr22 | 50639543 | 50639543 | G > A | Change of PLAG1 binding |
| TRABD | chr22 | 50608627 | 50608627 | C > G | Change of PLAG1 binding |
| TRIM27 | chr6 | 28949254 | 28949254 | A > C | Decreasing of enhancer |
| | | | | | activity |
| TRIM27 | chr6 | 28949312 | 28949312 | C > T | Increasing of enhancer |
| | | | | | activity |
| TRIM27 | chr6 | 28949469 | 28949469 | C > A | Increasing of enhancer |
| | | | | | activity |
| TRIM27 | chr6 | 28949509 | 28949509 | G > A | Increasing of enhancer |
| | | | | | activity |
| TRIM27 | chr6 | 28949511 | 28949511 | G > A | Increasing of enhancer |
| | | | | | activity |
| TRIM27 | chr6 | 28949524 | 28949524 | C > T | Increasing of enhancer |
| | | | | | activity |
| TRIM27 | chr6 | 28949535 | 28949535 | C > G | Increasing of enhancer |
| | | | | | activity |
| TRIM27 | chr6 | 28949821 | 28949821 | C > T | Increasing of enhancer |
| | | | | | activity |
| TRIM27 | chr6 | 28949841 | 28949841 | G > A | Increasing of enhancer |
| | | | | | activity |
| TRIM27 | chr6 | 28949944 | 28949944 | C > A | Increasing of enhancer |
| | | | | | activity |
| TRIM27 | chr6 | 28950014 | 28950014 | C > T | Increasing of enhancer |
| | | | | | activity |
| TRIM27 | chr6 | 28950037 | 28950037 | CGGTCAGGGA | Increasing of enhancer |
| | | | | ATGAGGTTTT | activity |
| | | | | TCTGTTTTAA | |
| | | | | CCT | |
| | | | | (SEQ ID | |
| | | | | NO: 480)>- | |
| TRIM27 | chr6 | 28950039 | 28950039 | G > A | Increasing of enhancer |
| | | | | | activity |
| TRIM27 | chr6 | 28950050 | 28950050 | G > A | Decreasing of enhancer |
| | | | | | activity |
| TRIM27 | chr6 | 28950052 | 28950052 | G > A | Increasing of enhancer |
| | | | | | activity |
| TRIM27 | chr6 | 28950056 | 28950056 | T > C | Increasing of enhancer |
| | | | | | activity |
| TRIM27 | chr6 | 28950486 | 28950486 | G > T | Increasing of enhancer |
| | | | | | activity |
| TRIM27 | chr6 | 28950885 | 28950885 | A > G | Increasing of enhancer |
| | | | | | activity |
| TRMT11, | chr6 | 127436064 | 127436064 | C > C | Increasing of enhancer |
| ECHDC1, | | | | | activity |
| HINT3, | | | | | |
| C6orf173, | | | | | |
| RNF146 | | | | | |
| TSC22D3 | | NA | NA | | Gain of enhancer |
| TSC22D3 | | NA | NA | | Gain of enhancer |
| TSC22D3 | | NA | NA | | Gain of enhancer |
| TSC22D3 | | NA | NA | | Gain of enhancer |
| TSC22D3 | | NA | NA | | Gain of enhancer |
| TSC22D3 | | NA | NA | | Gain of enhancer |
| TSC22D3 | | NA | NA | | Gain of enhancer |
| TSC22D3 | | NA | NA | | Gain of enhancer |
| TSC22D3 | | NA | NA | | Gain of enhancer |
| TSC22D3 | | NA | NA | | Gain of enhancer |
| TSLP | chr5 | 110176128 | 110176128 | G > T | Increasing of NHLH1 binding; |
| | | | | | Increasing of enhancer |
| | | | | | activity |
| TSPAN31, | chr12 | 58165085 | 58165085 | G > A | Increasing of enhancer |
| CYP27B1, | | | | | activity |
| TSFM, | | | | | |
| AVIL, | | | | | |
| FAM119B | | | | | |
| TTC24 | chr1 | 156470002 | 156470002 | T > A | Change of SP4 binding |
| TTC24 | chr1 | 156470227 | 156470227 | T > G | Change of SP4 binding |
| TTC24 | chr1 | 156470331 | 156470331 | C > A | Change of SP4 binding |
| TTC24 | chr1 | 156470445 | 156470445 | C > G | Change of SP4 binding |
| TTC24 | chr1 | 156470674 | 156470674 | T > C | Change of SP4 binding |
| TTC24 | chr1 | 156561525 | 156561525 | T > C | Change of SP4 binding |
| TTC24 | chr1 | 156561584 | 156561584 | C > G | Change of SP4 binding |
| TTC24 | chr1 | 156645564 | 156645564 | G > A | Change of SP4 binding |
| TYK2, ICAM3 | chr19 | 10520064 | 10520064 | G > A | |
| TYW5 | chr2 | 200780737 | 200780737 | T > C | Decreasing of enhancer |
| | | | | | activity |
| UCP2 | chr11 | 73694754 | 73694754 | C > T | Gain of PAX5; PAX8 binding; |
| | | | | | Increasing of enhancer |
| | | | | | activity |
| UPK3A | chr22 | 45676678 | 45676678 | A > G | Loss of GATA2 motif; Loss of |
| | | | | | enhancer activity |
| UROS | chr10 | 127505277 | 127505277 | C > T | Gain of ESRRG; NR2F6; |
| | | | | | NR2F2; NR2C2 binding; |
| | | | | | Decreasing of enhancer |
| | | | | | activity |
| USP12 | chr13 | 27523026 | 27544353 | Amplification | Gain of enhancer |
| VPS13C | chr15 | 62391608 | 62391608 | T > C | Decreasing of enhancer |
| | | | | | activity |
| WFS1 | chr4 | 6299940 | 6299940 | C > T | Decreasing of enhancer |
| | | | | | activity |
| WFS1 | chr4 | 6299387 | 6299387 | G > A | Decreasing of enhancer |
| | | | | | activity |
| XBP1 | chr22 | 29196757 | 29196757 | G > C | Gain of ZIC3 binding; |
| | | | | | Decreasing of enhancer |
| | | | | | activity |
| ZFAND3 | chr6 | 37775652 | 37775652 | G > A | Loss of NEUROD1 binding; |
| | | | | | Loss of enhancer |
| ZFAS1 | chr20 | 47905499 | 47905499 | T > G | Gain of JUND motif; |
| | | | | | Increasing of enhancer |
| | | | | | activity |
| ZFP36L1 | chr14 | 69254191 | 69254191 | C > T | |
| ZIP11 | chr17 | 71006512 | 71006512 | A > C | |
| ZIP11 | chr17 | 71012473 | 71012473 | G > C | |
| ZMYND11 | chr10 | 375539 | 375539 | A > G | Change of ZNF274 binding |
| ZMYND11 | chr10 | 127618 | 127618 | A > C | Change of ZNF274 binding |
| ZNF48 | chr16 | 30935409 | 30935409 | C > G | Change of ZNF263 binding |
| ZNF48 | chr16 | 29911922 | 29911922 | G > C | Change of ZNF263 binding |
| ZNF48 | chr16 | 30346156 | 30346156 | A > C | Change of ZNF263 binding |
| ZNF48, | chr16 | 30669784 | 30669784 | G > C | Change of ZNF263 binding |
| SRCAP | | | | | |
| ZNF48, | chr16 | 30346156 | 30346156 | A > C | Change of ZNF263 binding |
| SRCAP | | | | | |
| ZNF512B | chr20 | 62594247 | 62594247 | T > C | Decreasing of enhancer |
| | | | | | activity |
| ZNF517, | chr8 | 145913001 | 145913001 | A > C | Change of ZNF224 binding |
| RPL8 | | | | | |
| ZNF517, | chr8 | 145913120 | 145913120 | A > T | Change of ZNF224 binding |
| RPL8 | | | | | |
| ZNF517, | chr8 | 145913262 | 145913262 | A > T | Change of ZNF224 binding |
| RPL8 | | | | | |
| ZNF596 | chr8 | 580156 | 580156 | C > G | Decreasing of enhancer |
| | | | | | activity |
| ZNF596 | chr8 | 580332 | 580332 | C > T | Decreasing of enhancer |
| | | | | | activity |
| ZNF596 | chr8 | 580370 | 580370 | C > T | Decreasing of enhancer |
| | | | | | activity |
| ZNF596 | chr8 | 580698 | 580698 | G > A | Decreasing of enhancer |
| | | | | | activity |
| ZNF596 | chr8 | 581293 | 581293 | G > C | Decreasing of enhancer |
| | | | | | activity |

### Methods of Reprogramming Cells

[0271] The present methods can include using SHAPE to alter expression of cell fate- and differentiation-related target genes, by introducing or removing a binding site for a cell-reprogramming transcription factor (e.g., adding a site for an activating TF or deleting a site that binds a repressor, activating by de-repression, or adding a site for a repressive TF to down-regulate expression). Installation of sequence motifs can be used to drive programmable cellular differentiation from one cell type to another target cell type.

[0272] SHAPE to program cellular differentiation (from iPSCs to specific cell types, or specific cell types into another) through the modification of TF gene expression that is involved in cell identity³³. The introduction of sequence motifs to modify (e.g., increase or decrease) the expression of a target gene product (e.g., RNA, protein) can be performed with a genetic modifier, where the resulting change in transcription of a single target gene or multiple target genes leads to differentiation of a cell type to another target cell type. Examples of cell-reprogramming transcription factors are listed in Table 7 below.

TABLE 7
Examples of cell-reprogramming transcription factors

| | Transcription |
|---|---|
| Cell type | factor |
| Embryonic | SALL4 |
| stem cells | OTX2 |
| | ZIC3 |
| | NANOG |
| | ZSCAN10 |
| | POU5F1 |
| | MYCN |
| | NR6A1 |
| | ZIC2 |
| | SOX2 |
| | MYC |
| | KLF4 |
| Neural | OTX2 |
| precursor cells | SALL4 |
| | SIX3 |
| | LHX2 |
| | SP8 |
| | SOX11 |
| | TCF3 |
| | PAX6 |
| | ZIC2 |
| | NR6A1 |
| | FOXG1 |
| | SOX2 |
| | ZIC1 |
| | REST |
| | POU3F2 |
| | HES1 |
| | RFX4 |
| | NEUROG2 |
| | ASCL1 |
| | PLAGL1 |
| | MYC |
| | KLF4 |
| Cardiomyocytes | ANKRD1 |
| | NKX2-5 |
| | E2F8 |
| | TBX5 |
| | MEF2A |
| | ZBF193 |
| | MSX2 |
| | SOX11 |
| | GATA4 |
| | LRRFIP1 |
| | HAND2 |
| Hepatocytes | NR1H4 |
| | NR1I2 |
| | HNF4A |
| | NR5A2 |
| | HNF4G |
| | ATF5 |
| | NR1I3 |
| | HHEX |
| | PROX1 |
| | FOXA3 |
| | CEBPA |
| | GATA4 |
| Motor neurons | MNX1 |
| | ESRRG |
| | ISL2 |
| | HOXC6 |
| | CREM |
| | NHLH1 |
| | ZNF92 |
| | GZF1 |
| | GLIS3 |
| | ISL1 |
| | POU3F2 |
| | MYT1L |
| | ASCL1 |
| | NEUROG2 |
| | LHX3 |
| Pancreatic islet | RFX6 |
| cells | INSM1 |
| | PAX6 |
| | ISL1 |
| | NEUROD1 |
| | GLIS3 |
| | NR5A2 |
| | ZNF165 |
| | ARX |
| | MNX1 |
| | MAFB |
| | PDX1 |
| | PAX4 |
| | NEUROG3 |
| Melanocytes | PAX3 |
| | ALX1 |
| | TFAP2A |
| | MITF |
| | E2F7 |
| | SNAI2 |
| | LZTS1 |
| | ZFY |
| | TCFL5 |
| | PKNOX2 |
| | SOX10 |
| Retinal pigment | OTX2 |
| epithelial | SIX3 |
| | LHX2 |
| | PAX6 |
| | FOXD1 |
| | MITF |
| | C11orf9 |
| | ZNF92 |
| | GLIS3 |
| | SOX9 |
| | NRL |
| | CRX |
| | RAX |
| | MYC |
| | KLF4 |

### Methods for Heritable Target Gene Repression

[0273] Methlyation of CpG dinucleotides at promoters or enhancers are known for transcriptional silencing³⁴. This DNA modification is maintained during replication by endogenous DNMT1. Previous studies of introducing methylated DNA at the promoter of reporter plasmids showed the repression of reporter genes³⁵⁻³⁷. SHAPE can be used for the installation of methylated CpGs at the regulatory elements (promoters or enhancers) for heritable target gene repression. To achieve CpG methylation at the promoters or enhancers of target genes, first, we will identify genes that are highly expressed in target cells. Second, we will methylate CpGs for insertion motifs in vitro using methylases and SAM. The methylated CpGs can be inserted into the target regions via genetic modifiers. The in vivo methylation status can be determined via bisulfite genomic sequencing of target regions, and the repression effect of target genes can be validated by RT-qPCR.

[0274] non-coding RNA is a common strategy to perform target gene repression, where an RNA sequence with complementarity to a target messenger RNA (mRNA) hybridizes to its target and either accelerates degradation of the mRNA or prevents translation of the mRNA, ultimately reducing target gene protein production. Here we describe a strategy within SHAPE to install sequence motifs that induce targeting of endogenous non-coding RNAs (e.g., miRNAs, siRNAs, lncRNAs) for heritable target gene repression via RNA interference. Following the identification of endogenously expressed endogenous non-coding RNAs (e.g., miRNAs, siRNAs, lncRNAs) in a cell type or cell types of interest, the specific binding sites of these non-coding RNAs can be introduced into the target gene transcript at either the 5′ or 3′ UTR or in intronic regions via genetic modifiers with the ability to introduce insertion edits (e.g., programmable nucleases+ssODNs/dsODNs, prime editors). This method would be validated by RT-qPCR of the target gene transcript to assess RNA knockdown or protein-based assays (e.g., western blot, ELISA) to assess downstream protein knockdown to see if target gene repression is achieved.

SHAPE to Increase or Decrease Transcript Stability, and/or Transcription, and/or Protein Output

[0275] The activation of target gene protein output can also be performed through the introduction of sequence motifs in the untranslated region to increase transcript stability. Following the identification or generation of sequence motifs that have the potential to promote RNA stability, genetic modifiers with the ability to introduce insertion edits (e.g., programmable nucleases+ssODNs/dsODNs, prime editors) can be used to target the 5′ and/or 3′ untranslated regions (UTRs) of target genes. The introduction of these RNA-stabilizing sequence motifs can be inserted at all targetable positions of the UTRs to find the optimal positioning of the editing event. The stabilization RNA can be read out through RT-qPCR to quantitate the increase in target RNA abundance that should occur through a decreased rate of RNA degradation.

### Multiplex SHAPE

[0276] Multiplex genome editing with programmable nucleases, base editors, and prime editors can be utilized to induce more robust activation for a single target gene. The potential to modify more than one genomic location within regulatory elements of a single target gene may enable additive or synergistic effects for target gene activation. Previous studies showed multiplexed genome engineering of up to 25 human endogenous targets, suggesting up to 25 sites can be simultaneously edited for robust activation of target genes (McCarty, N. S., Graham, A. E., Studená, L. et al. Nat Commun 11, 1281 (2020), Campa, C. C., Weisbach, N. R., Santinha, A. J. et al. Nat Methods 16, 887-893 (2019)). Multiplex editing can be combinations of different strategies, including: 1) introduction of a de novo transcription factor binding site 2) modification of an endogenous transcription factor site to either increase or decrease its regulatory potential 3) modification of endogenous spacing of transcription factor binding sites to increase or decrease regulatory potential. Multiplex editing can be performed within a single regulatory element (e.g., promoter, enhancer), or across multiple regulatory elements.

[0277] Multiplex genome editing with programmable nucleases, base editors, and prime editors can also be utilized to induce multi-gene activation. Previous studies showed multiplexed genome engineering of up to 25 human endogenous targets, suggesting up to 25 sites can be simultaneously edited for muti-gene activation (McCarty, N. S., Graham, A. E., Studená, L. et al. Nat Commun 11, 1281 (2020), Campa, C. C., Weisbach, N. R., Santinha, A. J. et al. Nat Methods 16, 887-893 (2019)). The potential to modify more than one genomic location may enable the ability to activate multiple genes in parallel with SHAPE. Multiplex editing can be combinations of different strategies, including: 1) introduction of a de novo transcription factor binding site 2) modification of an endogenous transcription factor site to either increase or decrease its regulatory potential 3) modification of endogenous spacing of transcription factor binding sites to increase or decrease regulatory potential. Multiplex editing can be performed within a single regulatory element (e.g., promoter, enhancer), or across multiple regulatory elements.

### EXAMPLES

[0278] The invention is further described in the following examples, which do not limit the scope of the invention described in the claims. The examples described herein show gene expression activation by the SHAPE platform using both dual adenine and cytosine base editors and prime editors to install de novo transcription factor binding sites in HEK293T cells. A variety of transcription factor binding motifs were inserted into endogenous genomic contexts, and gene expression changes were measured at the RNA level. Our findings broaden the capabilities for durable and heritable gene activation by precision genome engineering.

[0279] Methods and Materials

[0280] The Methods and Materials described herein were used in the Examples provided herein.

[0281] Molecular Cloning

[0282] All base editor (BE) and prime editor (PE) constructs were cloned into a mammalian expression plasmid backbone under the control of a pCMV promoter (AgeI and NotI restriction digest of parental plasmid Addgene No. 112101). Gibson fragments with matching overlaps were PCR-amplified using Phusion High-fidelity polymerase (NEB). Fragments were gel-purified and assembled for 1 hour at 50° C. and transformed into chemically competent E. coli (XL1-Blue, Agilent). All guide RNA (gRNA) constructs were cloned into a BsmBI-digested pUC19-based entry vector (BPK1520, Addgene No. 65777) with a U6 promoter driving gRNA expression. We designed the pegRNAs following the previously described default design rules for designing pegRNAs and ngRNAs (Anzalone et al, Nature 2019, 576, pages 149-157). PegRNAs were cloned into the Bsal-digested pU6-pegRNA-GG-acceptor entry vector (Addgene No. 132777) and ngRNAs were cloned into the BsmBI-digested entry vector BPK1520 that is mentioned above. Oligos containing the spacer, the 5′phosphorylated pegRNA scaffold, and the 3′ extension sequences were annealed to form dsDNA fragments with compatible overhangs and ligated using T4 ligase (NEB). All plasmids used for transfection experiments were prepared using Qiagen Midi or Maxi Plus kits.

[0283] Guide RNAs Used in Nuclease and Base Editor Experiments

[0284] All gRNAs for base editors were of the form 5′-NNNNNNNNNNNNNNNNNNNNCGTTTTAGAGCTAGAAATAGCAAGTTAAAATAAGG CTAGTCCGTTATCAACTTGAAAAAGTGGCACCGAGTCGGTGCTTTTTTT-3′. (SEQ ID NO: 4)

TABLE A
Shown below are the spacer regions
(NNNNNNNNNNNNNNNNNNNN in
SEQ ID NO: 4) for these gRNAs
(all written 5′ to 3′).

| Target | | SEQ | | SEQ |
|---|---|---|---|---|
| gene/ | Spacer | ID | Genomic target | ID |
| site | sequence | NO: | sequence | NO: |
| RCC1 | AACCACACAACGCTA | 6 | AACCACACAACGCTAT | 6 |
| promoter | TGACA | | GACA | |
| SAE1 | TGCCACATAAGTGAC | 7 | TGCCACATAAGTGACC | 7 |
| promoter | CACGT | | ACGT | |
| COMT | TACCAGCTCTGGGAG | 8 | TACCAGCTCTGGGAGA | 8 |
| promoter | ACCAC | | CCAC | |
| RARA | TTCCAGCTGGTCCCTA | 9 | TTCCAGCTGGTCCCTAG | 9 |
| promoter | GAAG | | AAG | |
| IVD | GACCAATTTACTGGG | 10 | GACCAATTTACTGGGTA | 10 |
| promoter | TACGT | | CGT | |

[0285] Prime Editing Guide RNAs (pegRNAs)

[0286] All pegRNAs for prime editors were of the form 5′-NNNNNNNNNNNNNNNNNNNNGTTTTAGAGCTAGAAATAGCAAGTTAAAATAAGGC TAGTCCGTTATCAACTTGAAAAAGTGGCACCGAGTCGGTGC TTTTTTT-3′. (SEQ ID NO: 11)

TABLE B
Shown below are the spacer and 3′ extension sequences
for these pegRNAs (all written 5′ to 3′).

| | | | SEQ | | SEQ |
|---|---|---|---|---|---|
| | | | ID | | ID |
| Target_ | Peg | Spacer_ | NO: | Extension_ | NO: |
| name | RNA | sequence | (#) | sequence | (#) |
| MYOD1 | A | GATAAATAGCCC | 441 | AGGGCTTCCTCACCCCTAGCTTC | 12 |
| | | AGGGCGCC | | TCGCCAGGCgggggccaatcagcGCCC | |
| | | | | TGGGCTATTT | |
| MYOD1 | A | GATAAATAGCCC | 442 | AGGGCTTCCTCACCCCTAGCTTC | 13 |
| | | AGGGCGCC | | TCGCCAGGCgggggccaatcagcgggcca | |
| | | | | atcagcGCCCTGGGCTATTT | |
| MYOD1 | A | GATAAATAGCCC | 443 | AGGGCTTCCTCACCCCTAGCTTC | 14 |
| | | AGGGCGCC | | TCGCCAGGCggggccccgcccccGCCC | |
| | | | | TGGGCTATTT | |
| MYOD1 | A | GATAAATAGCCC | 444 | AGGGCTTCCTCACCCCTAGCTTC | 15 |
| | | AGGGCGCC | | TCGCCAGGCggggccccgcccccggcccc | |
| | | | | gcccccGCCCTGGGCTATTT | |
| MYOD1 | A | GATAAATAGCCC | 445 | AGGGCTTCCTCACCCCTAGCTTC | 16 |
| | | AGGGCGCC | | TCGCCAGGCggcacttccgggttGCCCT | |
| | | | | GGGCTATTT | |
| MYOD1 | A | GATAAATAGCCC | 446 | AGGGCTTCCTCACCCCTAGCTTC | 17 |
| | | AGGGCGCC | | TCGCCAGGCggcacttccgggttcacttccg | |
| | | | | ggttGCCCTGGGCTATTT | |
| MYOD1 | A | GATAAATAGCCC | 447 | AGGGCTTCCTCACCCCTAGCTTC | 18 |
| | | AGGGCGCC | | TCGCCAGGCggccttatctgGCCCTGG | |
| | | | | GCTATTT | |
| MYOD1 | A | GATAAATAGCCC | 448 | AGGGCTTCCTCACCCCTAGCTTC | 19 |
| | | AGGGCGCC | | TCGCCAGGCggccttatctgccttatctgGC | |
| | | | | CCTGGGCTATTT | |
| MYOD1 | A | GATAAATAGCCC | 449 | AGGGCTTCCTCACCCCTAGCTTC | 20 |
| | | AGGGCGCC | | TCGCCAGGCggccttatctgccttatctgcctt | |
| | | | | atctgGCCCTGGGCTATTT | |
| MYOD1 | A | GATAAATAGCCC | 450 | AGGGCTTCCTCACCCCTAGCTTC | 21 |
| | | AGGGCGCC | | TCGCCAGGCggttccttccttccGCCCT | |
| | | | | GGGCTATTT | |
| MYOD1 | A | GATAAATAGCCC | 451 | AGGGCTTCCTCACCCCTAGCTTCTCG | 22 |
| | | AGGGCGCC | | CCAGGCggttccttccttccttccttccttc | |
| | | | | cGCCCTGGGCTATTT | |
| MYOD1 | B | CCTCCCTCCCTGC | 452 | GCCCCTCCACACTGGCGTGCGC | 23 |
| | | CCGGTAG | | GCTAGGTCCCCTAgggggccaatcagc | |
| | | | | CCGGGCAGGGAGGG | |
| MYOD1 | B | CCTCCCTCCCTGC | 453 | GCCCCTCCACACTGGCGTGCGC | 24 |
| | | CCGGTAG | | GCTAGGTCCCCTAgggggccaatcagc | |
| | | | | gggccaatcagcCCGGGCAGGGAGGG | |
| MYOD1 | B | CCTCCCTCCCTGC | 454 | GCCCCTCCACACTGGCGTGCGC | 25 |
| | | CCGGTAG | | GCTAGGTCCCCTAggggccccgccccc | |
| | | | | CCGGGCAGGGAGGG | |
| MYOD1 | B | CCTCCCTCCCTGC | 455 | GCCCCTCCACACTGGCGTGCGC | 26 |
| | | CCGGTAG | | GCTAGGTCCCCTAggggccccgccccc | |
| | | | | ggccccgcccccCCGGGCAGGGAGG | |
| | | | | G | |
| MYOD1 | B | CCTCCCTCCCTGC | 456 | GCCCCTCCACACTGGCGTGCGC | 27 |
| | | CCGGTAG | | GCTAGGTCCCCTAggcacttccgggttC | |
| | | | | CGGGCAGGGAGGG | |
| MYOD1 | B | CCTCCCTCCCTGC | 457 | GCCCCTCCACACTGGCGTGCGC | 28 |
| | | CCGGTAG | | GCTAGGTCCCCTAggcacttccgggttC | |
| | | | | acttccgggttCCGGGCAGGGAGGG | |
| MYOD1 | B | CCTCCCTCCCTGC | 458 | GCCCCTCCACACTGGCGTGCGC | 29 |
| | | CCGGTAG | | GCTAGGTCCCCTAggccttatctgCCG | |
| | | | | GGCAGGGAGGG | |
| MYOD1 | B | CCTCCCTCCCTGC | 459 | GCCCCTCCACACTGGCGTGCGC | 30 |
| | | CCGGTAG | | GCTAGGTCCCCTAggccttatctgccttat | |
| | | | | ctgCCGGGCAGGGAGGG | |
| MYOD1 | B | CCTCCCTCCCTGC | 460 | GCCCCTCCACACTGGCGTGCGC | 31 |
| | | CCGGTAG | | GCTAGGTCCCCTAggccttatctgccttat | |
| | | | | ctgccttatctgCCGGGCAGGGAGGG | |
| MYOD1 | B | CCTCCCTCCCTGC | 461 | GCCCCTCCACACTGGCGTGCGC | 32 |
| | | CCGGTAG | | GCTAGGTCCCCTAggttccttccttccC | |
| | | | | CGGGCAGGGAGGG | |
| MYOD1 | B | CCTCCCTCCCTGC | 462 | GCCCCTCCACACTGGCGTGCGC | 33 |
| | | CCGGTAG | | GCTAGGTCCCCTAggttccttccttccttc | |
| | | | | cttccttccCCGGGCAGGGAGGG | |
| MYOD1 | C | GAGGTTTGGAAA | 463 | GGCAGCCCTAGGCGGCTGCACT | 34 |
| | | GGGCGTGC | | TGGCTCTCCGGCAgggggccaatcagc | |
| | | | | CGCCCTTTCCAAAC | |
| MYOD1 | C | GAGGTTTGGAAA | 464 | GGCAGCCCTAGGCGGCTGCACT | 35 |
| | | GGGCGTGC | | TGGCTCTCCGGCAgggggccaatcagc | |
| | | | | gggccaatcagcCGCCCTTTCCAAAC | |
| MYOD1 | C | GAGGTTTGGAAA | 465 | GGCAGCCCTAGGCGGCTGCACT | 36 |
| | | GGGCGTGC | | TGGCTCTCCGGCAggggccccgccccc | |
| | | | | CGCCCTTTCCAAAC | |
| MYOD1 | C | GAGGTTTGGAAA | 466 | GGCAGCCCTAGGCGGCTGCACT | 37 |
| | | GGGCGTGC | | TGGCTCTCCGGCAggggccccgccccc | |
| | | | | ggccccgcccccCGCCCTTTCCAAAC | |
| MYOD1 | C | GAGGTTTGGAAA | 467 | GGCAGCCCTAGGCGGCTGCACT | 38 |
| | | GGGCGTGC | | TGGCTCTCCGGCAggcacttccgggttC | |
| | | | | GCCCTTTCCAAAC | |
| MYOD1 | C | GAGGTTTGGAAA | 468 | GGCAGCCCTAGGCGGCTGCACT | 39 |
| | | GGGCGTGC | | TGGCTCTCCGGCAggcacttccgggttC | |
| | | | | acttccgggttCGCCCTTTCCAAAC | |
| MYOD1 | C | GAGGTTTGGAAA | 469 | GGCAGCCCTAGGCGGCTGCACT | 40 |
| | | GGGCGTGC | | TGGCTCTCCGGCAggccttatctgCGC | |
| | | | | CCTTTCCAAAC | |
| MYOD1 | C | GAGGTTTGGAAA | 470 | GGCAGCCCTAGGCGGCTGCACT | 41 |
| | | GGGCGTGC | | TGGCTCTCCGGCAggccttatctgccttat | |
| | | | | ctgCGCCCTTTCCAAAC | |
| MYOD1 | C | GAGGTTTGGAAA | 471 | GGCAGCCCTAGGCGGCTGCACT | 42 |
| | | GGGCGTGC | | TGGCTCTCCGGCAggccttatctgccttat | |
| | | | | ctgccttatctgCGCCCTTTCCAAAC | |
| MYOD1 | C | GAGGTTTGGAAA | 472 | GGCAGCCCTAGGCGGCTGCACT | 43 |
| | | GGGCGTGC | | TGGCTCTCCGGCAggttccttccttccC | |
| | | | | GCCCTTTCCAAAC | |
| MYOD1 | C | GAGGTTTGGAAA | 473 | GGCAGCCCTAGGCGGCTGCACT | 44 |
| | | GGGCGTGC | | TGGCTCTCCGGCAggttccttccttccttc | |
| | | | | cttccttccCGCCCTTTCCAAAC | |
| HBB | D | GGCTCTTCTGGCA | 474 | GAGGGAGGGCTGAGGGTTTGAA | 45 |
| | | CTGGCTT | | GTCCAACTCCTAAGcacttccgggttca | |
| | | | | cttccgggttCCAGTGCCAGAAGA | |
| IL2RA | E | GGATGAGAGAAG | 475 | ATTGGGCTGGCGTGTTCAGCCA | 46 |
| | | AGAGTGCT | | GGAAACTGCCTAGCcacttccgggttca | |
| | | | | cttccgggttACTCTCTTCTCTCA | |
| HER2 | F | GCCCTCTCTTCGC | 476 | AGGCGTCCCGGCGCTAGGAGGG | 47 |
| | | GCAGGCCT | | ACGCACCCAGGcacttccgggttcacttcc | |
| | | | | gggttCCTGCGCGAAGA | |
| EpCAM | G | GAGCGCACACCT | 477 | TCCCGGGAAGGGGCCGAGAGG | 48 |
| | | GCCCGACC | | CGGGGCCGCCAGGTcacttccgggttc | |
| | | | | acttccgggttCGGGCAGGTGTG | |

# SEQ ID NO:

[0287] PE3 nicking guide RNAs (ngRNAs)

[0288] All nicking gRNAs for PE3 system were of the form 5′-NNNNNNNNNNNNNNNNNNNNCGTTTTAGAGCTAGAAATAGCAAGTTAAAATAAGG CTAGTCCGTTATCAACTTGAAAAAGTGGCACCGAGTCGGTGCTTTTTTT-3′. (SEQ ID NO: 49)

TABLE C
Shown below are the protospacer regions
for these nicking gRNAs
(NNNNNNNNNNNNNNNNNNNN in SEQ ID NO: 49,
all written 5′ to 3′).

| Target | | | SEQ ID |
|---|---|---|---|
| gene | pegRNA | Protospacer sequence | NO: |
| MYOD1 | A | GAGGCCAATAGGAACACTGC | 50 |
| MYOD1 | A | CTCCTGTCCGGCCTGATTTG | 51 |
| MYOD1 | A | CCACCCCTCCCTCTCCTGTC | 52 |
| MYOD1 | B | CACCCGACTGCTGTATCCGC | 53 |
| MYOD1 | B | GGCCGCAGGGGCCCGCAGAC | 54 |
| MYOD1 | B | CCAATAGGAACACTGCGGGG | 55 |
| MYOD1 | C | CTCCTCTGTCCCCTGATTTG | 56 |
| MYOD1 | C | GCTAGGTCCCCTACCGGGCA | 57 |
| MYOD1 | C | TCCACACTGGCGTGCGCGCT | 58 |
| HBB | D | GTGGAGCCACACCCTAGGGT | 59 |
| IL2RA | E | GTTGATGACAATATAGTTTG | 60 |
| HER2 | F | GCTGCATTTAGGGATTCTCCG | 61 |
| EpCAM | G | GACTCATCAACGAGCACCAG | 62 |

[0289] Cell Culture and Transfections

[0290] STR-authenticated HEK293T (CRL-3216), K562 (CCL-243), HeLa (CCL-2), and U2OS cells (similar match to HTB-96; gain of #8 allele at the D5S818 locus) were used in this study. HEK293T and HeLa cells were grown in Dulbecco's Modified Eagle Medium (DMEM, Gibco) with 10% heat-inactivated fetal bovine serum (FBS, Gibco) supplemented with 1% penicillin-streptomycin (Gibco) antibiotic mix. K562 cells were grown in Roswell Park Memorial Institute (RPMI) 1640 Medium (Gibco) with 10% FBS supplemented with 1% Pen-Strep and 1% GlutaMAX (Gibco). U2OS cells were grown in DMEM with 10% FBS supplemented with 1% Pen-Strep and 1% GlutaMAX. Cells were grown at 37° C. in 5% CO2 incubators and periodically passaged upon reaching around 80% confluency. Cell culture media supernatant was tested for mycoplasma contamination using the MycoAlert mycoplasma detection kit (Lonza) and all tests were negative throughout the experiments.

[0291] Transfections

[0292] HEK293T cells were seeded at 1.25×10⁴ cells per well into 96-well flat bottom cell culture plates (Corning) for DNA on-target experiments or at 6.25×10⁴ cells per well into 24-well cell culture plates (Corning). 24 hours post-seeding, cells were transfected with 30 ng of control or base/prime editor plasmid and 10 ng of gRNA plasmid (and 3.3 ng nicking gRNA plasmid for PE3) using 0.3 μL of TransIT-X2 (Minis) lipofection reagent for experiments in 96-well plates, 150 ng control or base editor plasmid and 50 ng gRNA, or 375 ng dCas9-VPR and 125 ng gRNA, and 3 μL TransIT-X2 for experiments in 24-well plates. K562 cells were electroporated using the SF Cell Line Nucleofector X Kit (Lonza) or Kit V (Lonza), according to the manufacturer's protocol with 2×10⁵ cells per nucleofection and 800 ng control or base/prime editor plasmid, 200 ng gRNA or pegRNA plasmid, and 83 ng nicking gRNA plasmid (for PE3) or with 1×10⁶ cells per nucleofection and 3840 ng control or prime editor plasmid, 960 ng pegRNA plasmid, and 398.4 ng of nicking gRNA plasmid (for PE3), and 3750 ng dCas9-VPR plasmid and 1250 ng of gRNA. When GFP plasmid was co-transfected, half amount of gRNAs or nicking gRNAs was used. U2OS cells were electroporated using the SE Cell Line Nucleofector X Kit (Lonza) with 2×10⁵ cells and 800 ng control or base/prime editor plasmid, 200 ng gRNA or pegRNA, and 83 ng nicking gRNA (for PE3). HeLa cells were electroporated using the SE Cell Line 4D-Nucleofector X Kit (Lonza) with 5×10⁵ cells and 800 ng control or base/prime editor, 200 ng gRNA or pegRNA, and 83 ng nicking gRNA (for PE3). 72 hours post-transfection, cells were lysed for extraction of genomic DNA (gDNA).

[0293] DNA and RNA Extraction

[0294] For DNA on-target experiments in 96-well plates, 72 h post-transfection, cells were washed with PBS, lysed with freshly prepared 43.54, DNA lysis buffer (50 mM Tris HCl pH 8.0, 100 mM NaCl, 5 mM EDTA, 0.05% SDS), 5.25 μL Proteinase K (NEB), and 1.25 μL 1M DTT (Sigma). For DNA off-target experiments in 24-well plates, cells were lysed in 174 DNA lysis buffer, 21 μL Proteinase K, and 5 μL 1M DTT. For RNA off-target experiments, GFP sorted cells were split 20% for DNA and 80% for RNA extraction. Cells were centrifuged (200 g, 8 min) and lysed as above for DNA or with 350 μL RNA lysis buffer LBP (Macherey-Nagel) for RNA. DNA lysates were incubated at 55° C. on a plate shaker overnight, then gDNA was extracted with 2× paramagnetic beads (as previously described), washed 3 times with 70% EtOH, and eluted in 30-80 μL 0.1×EB buffer (Qiagen). RNA lysates were extracted with the NucleoSpin RNA Plus kit (Macherey-Nagel) following the manufacturer's instructions.

[0295] Targeted Amplicon Sequencing

[0296] DNA targeted amplicon sequencing was performed as previously described (Grunewald et al, Nature 2019, 569, pages 433-437). Briefly, extracted gDNA was quantified using the Qubit dsDNA HS Assay Kit (Thermo Fisher). Amplicons were constructed in 2 PCR steps. In the first PCR, regions of interest (170-250 bp) were amplified from 5-20 ng of gDNA with primers containing Illumina forward and reverse adapters on both ends. PCR products were quantified on a Synergy HT microplate reader (BioTek) at 485/528 nm using a Quantifluor dsDNA quantification system (Promega), pooled and cleaned with 0.7× paramagnetic beads, as previously described. In a second PCR step (barcoding), unique pairs of Illumina-compatible indexes (equivalent to TruSeq CD indexes, formerly known as TruSeq HT) were added to the amplicons. The amplified products were cleaned up with 0.7× paramagnetic beads, quantified with the Quantifluor or Qubit systems, and pooled before sequencing. The final library was sequenced on an Illumina MiSeq machine using the Miseq Reagent Kit v2 (300 cycles, 2×150 bp, paired-end). Demultiplexed FASTQ files were downloaded from BaseSpace (Illumina).

[0297] Targeted Amplicon Sequencing Analysis

[0298] Amplicon sequencing data were analyzed with CRISPResso2 2.0.3016 that was run in base editor output mode. Allele frequency tables (CRISPResso output) display an editing window that includes the edited As or Cs (CCA motif in positions 3-4-5 with 1 being the most PAM-distal base).

[0299] Flow Cytometry

[0300] Cells were washed with cell staining buffer (Biolegends) after 72 hours post-transfection and incubated with PE conjugated IL2RA (Biolegends), HER2 (Biolegends) or EpCAM antibody (Biolegends) for 15 minutes, followed by twice wash with cell staining buffer. All PE positive cells were sorted and sorted cells were measured by a LSR Fortessa X-20 flow cytometer (BD) to test durability of target protein expression. Cells transfected with GFP plasmid were resuspended in cell staining buffer after 72 hours post-transfection and top 50% GFP positive cells were sorted.

[0301] Analysis of Potential SPACE-Encodable Transcription Factor Binding Sites

[0302] Annotated transcription start sites from hg38 refseq genes were obtained and filtered to exclude micro-RNAs, small NF90 associated RNAs (SNARs), long non-coding RNAs, small nucleolar RNAs, and anti-sense transcripts. These RNAs were filtered in part due to redundant annotations at the same transcription start sites (TSS) and to focus on protein-coding genes. Next, the remaining TSSes were padded to include the region −500 bp to 0 bp relative to the start site. From this 500 bp per-gene window, we found all matches of the “NNCCA GG” (SEQ ID NO:5) motif on either strand that contain a preferential dual-editing window for SPACE and a canonical SpCas9-PAM (NGG). In total, this defined 53,750 protospacers (45,383 unique). To assess the potential for TF motif creation, we used the reference sequence to create “SPACE-edited” sequences for each of the protospacers by modifying the CCA to TTG. Using a set of 386 transcription motifs from the JASPAR2016 motif list20 we determined which motifs could be created with the SPACE modification for each transcription factor. Motif matching was performed using the motifmatchr package using default parameters as part of the chromVAR suite of tools21. Created motifs were those that did not occur in the reference sequence but were matches in the SPACE-edited sequence.

[0303] Measurement of Target Gene Expression for Inserting TF Motis by PE3

[0304] HEK293T were transfected with PE3 (60 ng), pegRNA(20 ng) and nicking gRNA (6.64 ng). HEK293T was transfected using lipofection. 24 hours prior to transfection, HEK293T cells (625000) were seeded in 24-well plates and then transfected with the plasmids using 3 μl of Transit X2(Mirus Bio, cat #MIR6003) for HEK293T cells. For target gene expression analysis, total RNA was extracted from the cells 72 hours post-transfection using the NucleoSpin RNA Plus Kit (Clontech, cat #740984.250) and 250 ng of purified RNA was used for cDNA synthesis using a High Capacity RNA-to-cDNA kit (ThermoFisher, cat #4387406). 3 μl of 1:20 diluted cDNA was amplified by quantitative PCR (qPCR) using Fast SYBR Green Master Mix (ThermoFisher, cat #4385612) with the primers listed elsewhere in this application. qPCR reactions were performed on a LightCycler 480 (Roche) with the following program: initial denaturation at 95° C. for 20 seconds (s) followed by 45 cycles of 95° C. for 3 s and 60° C. for 30 s. Ct values greater than 35 were considered as 35, because Ct values fluctuate for transcripts expressed at very low levels. Gene expression levels were normalized to HPRT1 and calculated relative to that of the negative controls (PE3 with pegRNA cassette).

### Example 1: Introducing De Novo Transcription Factor Binding Sites for Gene Activation with Dual Adenine and Cytosine Base Editors

[0305] First, a bioinformatic analysis was performed to generate candidate genes with endogenous promoter sequences that can get converted into TF binding sites using SPACE. Potential target sites had to lie within −500 to 0 bp upstream of the TSS, have a C3C4A5 motif, with respect to the protospacer (1 being the most PAM-distal position). Only sites with a canonical NGG-PAM were considered. The number of genes with one or more creatable TF binding sites are shown in FIG. 8. Subsequently, five genes were selected for a BE-SHAPE proof-of-concept pilot experiment. HEK293T cells were transfected in duplicate with plasmids co-expressing either a nCas9 negative control or the dual-deaminase base editor SPACE as well as a gRNA targeting a genomic site in the promoter region of one of these 5 genes of interest (Table A). 48 hours after transfection, cells were trypsinized and split into a 96-well plate for DNA extraction and maintained in a 24-well plate for RNA extraction. Genomic DNA and RNA was harvested 72 hours post-transfection. DNA was used to create NGS-compatible libraries that were run on an Illumina MiSeq and analyzed using CRISPResso2 software. Two examples shown in FIGS. 9a and b indicate efficient dual base editing with SPACE at the target sites. RNA of cells from the same experiment was harvested, reverse transcribed using the High Capacity Kit from Applied Biosystems and used in RT-qPCR experiments (triplicate qPCR per condition) to determine the Ct values of nCas9 and SPACE experiments. The fold-change expression changes were calculated and showed an upregulation of expression following SPACE treatment (base editing) in all 5 genes tested (FIG. 9c). These data indicate that BE-SHAPE enabled the successful upregulation of targeted genes of interest.

### Example 2: Activation of MYOD1 Expression Through the Insertion of Transcription Factor Binding Sites Via Prime Editing

[0306] We tested the SHAPE system at the MYOD1 locus in HEK293T cells. First, we identified candidate transcription factor motif sequences to insert into varying positions of the MYOD1 locus, ranging from 250 bp upstream and 50 bp downstream of the MYOD1 transcription start site (TSS). We identified ELF, NFY, and SP transcription factors as being actively expressed in HEK293T cells, and additionally included GATA1 and EWS-FLI1 motifs as positive controls where exogenous GATA1 and EWS-FLI1 would be supplied exogenously (Table D).

TABLE D
Transcription factor motifs for transcription
factors that are expressed in target cell
lines HEK293T, U20S, and K562 (ELF, NFY, SP1)
and factors that are not expressed in target
cell lines (EWS-FLU, GATA1).

| Motif name | Motif sequence | SEQ ID NO: |
|---|---|---|
| ELF | AACCCGGAAGTG | 63 |
| NFY | GCTGATTGGCCC | 64 |
| GATA1 | CAGATAAGG | 65 |
| SP1 | GGGGGCGGGGCC | 66 |
| EWS-FLI1 | GGAA | 67 |

[0307] Next, we designed prime editing guide RNAs (pegRNAs) and nicking sgRNAs (ngRNAs) targeting nearby the MYOD1 TSS (Table B and C. We tested prime editing using the PE3 strategy and achieved meaningful insertion editing efficiencies across three different pegRNAs and 10 different motif insertions (FIG. 2). Following the successful insertion of transcription factor motifs at the MYOD1 locus by PE3, we assessed the changes in MYOD1 gene expression by RT-qPCR (see methods and materials). The ELF motif exhibited copy-dependent increases in MYOD1 expression, where ELF 2× yielded greater gene activation compared to ELF 1× across all pegRNA and ngRNA combinations (FIG. 3). The ELF motif insertion was able to promote gene activation that was up to 30-fold over the negative control. The SP, NFY, and GATA1 motif insertions yielded very modest increases in gene expression, with no clear advantages of introducing two copies (2×) of the motif compared to one copy (1×) (FIGS. 4, 5, 6). The EWS-FLI1 experiment was performed by providing an exogenous EWS-FLI1 activator by plasmid, and demonstrated meaningful activation levels for pegRNA A, giving gene activation levels of 30-50 fold greater than the negative control (FIG. 7). Only the EWS-FLI1 6× insertion worked, while the 3× insertion was much weaker in its ability to activate MYOD1 gene expression. These results are consistent with the understanding that EWS-FLI1 typically binds to a minimum repeat sequence of 4×.

### Example 3: Stable and Durable Gene Activation or Protein Expression Via Inserting ELF(2×) Motif at Different Endogenous Human Gene Promoters by Enriching Edited Population with Sorting Cells Based on GFP Plasmid Co-Transfected or Sorting Based on Expression of Cell Surface Marker Target Genes

[0308] We tested the durability of the SHAPE system at various loci of endogenous promoters of MYOD1, HBB, IL2RA, HER2, and EpCAM in HEK293T and K562. To do so, we first enriched edited cells via sorting cells for GFP signal or target protein expression. To sort cells for GFP signal, cells were co-transfected with a separate GFP plasmid with prime editor complex that was designed to install ELF(2×) motif at the MYOD1, HBB, IL2RA, HER2, or EpCAM. To compare the durability of SHAPE with CRISPRa, cells co-transfected with dCas9-VPR targeting the same target regions and GFP plasmid were also sorted for GFP. We confirmed stable ELF(2×) insertion at the target promoters and stable target mRNA expression over 30 days post-transfection for GFP sorted HEK293T and K562 cells (FIGS. 13-18). However, dCas9-VPR transfected cells showed rapid decrease of target gene expression between 3 and 10 post-transfection (FIGS. 13-15). Next, instead of enriching cells based on GFP protein expression, we used a different enrichment method that sorts cells for target protein expression. With the assumption that inserting ELF2× at the promoters of cell surface marker genes (IL2RA, HER2 and EpCAM) would lead to an increase in their mRNAs followed by protein expression, we sorted cells for cell surface marker proteins. Since this method differentiating cells that have a functional outcome of ELF2× insertion, the insertion efficiency was higher than sorting methods based on GFP signal. We used the same sorting strategy for dCas9-VPR transfected cells that express the same cell surface marker proteins. We observed significantly higher levels of mRNA and protein expression of HER2, IL2RA, and EpCAM for sorted cells compared to the ones from the unsorted populations for both SHAPE and dCas9-VPR approaches. While dCas9-VPR approach showed that the elevated expression of target mRNA and protein expression after sorting dropped drastically between three and 10 days post-transfection, SHAPE via prime editing maintained stable ELF(2×) insertion, mRNA expression, and protein expression over 30 days post-transfection (FIGS. 19-21).

### Example 4: Pooled Screening of Diverse Transcription Factor Cluster Motifs for SHAPE-Mediated Target Protein Expression

[0309] We explored the insertion of diverse transcription factor cluster motifs via prime editing to achieve target protein expression. To do so, we used the IL2RA promoter due to our previous success in activating IL2RA protein expression and the ability to sort for its expression as a cell surface marker (FIG. 20). For the exploration of diverse transcription factor cluster motifs, we used a database of clustered transcription factor motifs³⁸, and chose 94 of these clustered motifs based on transcription factor expression in a variety of cell types (K562, HEK293T, U2OS) (Table E). The chosen cluster motifs were all normalized to 24 bases by extending the motifs through the addition of repeating copies of the motif until the 24 bp length was reached. Additionally, we included a positive control ELF(2×) motif which we had previously shown to activate IL2RA protein expression, along with 5 negative control sequences (24 bp) created with a random DNA generator. All cluster motifs and control sequences were inserted at the same position within the IL2RA promoter using the pegRNA spacer sequence and ngRNA described previously (Table B, C). The pegRNA constructs encoding all cluster motifs and control sequences, in addition to the ngRNA, were pooled and double-electroporated into K562 with the electroporation events separated by 72 hours. Seven days after the second electroporation event, the K562 cells were sorted based on IL2RA protein expression into negative and positive populations. Genomic DNA was harvested from both the IL2RA negative and positive populations and targeted amplicon sequencing was performed at the prime editing insertion location. Each cluster motif insertion was counted within the sequencing reads in both the negative and positive samples, normalized based on total read count in each sample, and an enrichment score was calculated (FIG. 22). We found that the positive control ELF(2×) motif exhibited positive enrichment (FIG. 22, black) and that the 5 negative controls showed very little enrichment (FIG. 22, dark grey). Several of the cluster motifs within the library showed potential to repress and activate target protein expression, shown in the left and right tails of the plot, respectively.

TABLE E
Archetype sequences derived from hierarchal-
clustered transcription factor motifs and
relevant controls for pooled screening of
activating or repressing regulatory elements.

| | | | SEQ |
|---|---|---|---|
| | | | ID |
| Cluster | Name | Motif sequence | NO: |
| 1 | HD/1 | TGATTGCAATCA | 68 |
| 2 | HD/2 | CTAATTAA | 69 |
| 3 | HD/3 | TAATCGGAAAACGATTA | 70 |
| 4 | HD/4 | TTAAGTGC | 71 |
| 5 | HD/5 | AATTAAAAACCAATTA | 72 |
| 6 | HD/6 | AATTGGTGCTAAATG | 73 |
| 7 | HD/7 | TAATTAGCCAATTA | 74 |
| 8 | HD/8 | TAATTAAATTA | 75 |
| 9 | HD/9 | AATTAATTAAT | 76 |
| 10 | HD/10 | GTTAATGATTAAC | 77 |
| 11 | HD/11 | TAATCATCATTA | 78 |
| 12 | HD/12 | TGATTGACAG | 79 |
| 13 | NFY | AGCCAATCAG | 80 |
| 14 | CUX/1 | AAATCGATA | 81 |
| 15 | CUX/3 | ATCGATAACTGATCGAT | 82 |
| 16 | CUX/2 | ATCGATAACCCTATCGAT | 83 |
| 17 | CUX/4 | AATCAATGA | 84 |
| 18 | HD/13 | TTTATG | 85 |
| 19 | HD/14 | TGATTTATG | 86 |
| 20 | HD/15 | TGATGGATG | 87 |
| 21 | HD/16 | TTGATTAAT | 88 |
| 22 | HD/17 | GTCGTAAAA | 89 |
| 23 | CPEB1 | CAATAAAA | 90 |
| 24 | HD/18 | GCAATAAAA | 91 |
| 25 | HD/19 | TAATCCGATTA | 92 |
| 26 | HD/20 | GGATTA | 93 |
| 27 | HD/21 | TCAAGGA | 94 |
| 28 | HD/22 | CCACTTGA | 95 |
| 29 | TCF/LEF | AAGATCAAAG | 96 |
| 30 | NR/1 | GGGTCAAAGGTCA | 97 |
| 31 | NR/2 | AAGTCAAAAGTCA | 98 |
| 32 | NR/3 | TGGGGCAAAGGTCA | 99 |
| 33 | NR/4 | GGGTCATGACCC | 100 |
| 34 | NR/5 | TGACCTTATAAGGTCA | 101 |
| 35 | NR/6 | TGACCTTTAAAGGTC | 102 |
| 36 | NR/7 | GGTCATTCAAGGTCA | 103 |
| 37 | NR/8 | TGACCTTACATAAGGTCA | 104 |
| 38 | NR/9 | AGGTCAAACTGTGACCT | 105 |
| 39 | NR/10 | TGACCTTATTAAGGTCA | 106 |
| 40 | NR/11 | AAGTTCAAGGTCA | 107 |
| 41 | NR/12 | AGGTCATCCAAAGGTCA | 108 |
| 42 | NR/13 | AGGTCAAAAGGTCA | 109 |
| 43 | NR/14 | GTCAAAAAGTCA | 110 |
| 44 | NR/15 | GGGTCATTGAGTTCA | ill |
| 45 | NR/16 | AGGTCACGAAAGGTCA | 112 |
| 46 | NR/17 | AGGTCACCCTGACCT | 113 |
| 47 | NR/18 | CTCGAGGTCATTGACCC | 114 |
| 48 | NR/19 | GAAGTGGGTCA | 115 |
| 49 | CREB/ATF/1 | ATGACGTCA | 116 |
| 50 | CREB/ATF/2 | ATGACGTCAT | 117 |
| 51 | CREB/ATF/3 | ATGATGCAAT | 118 |
| 52 | CCAAT/CEBP | TTGCGCAAT | 119 |
| 53 | AP1/2 | TGCTGAGTCAT | 120 |
| 54 | AP1/1 | TGAGTCAT | 121 |
| 55 | MAF | ATTGCTGACTCAGCA | 122 |
| 56 | ZNF317 | GAATGACAGCTGACTTCTC | 123 |
| 57 | ZNF547 | GCTAATGCAGCAGGCATAC | 124 |
| 58 | Ebox/CACGTG/1 | GTCACGTGA | 125 |
| 59 | Ebox/CACGTG/2 | GCCACGTGC | 126 |
| 60 | HIF | TACGTGC | 127 |
| 61 | CREB3/XBP1 | GATGACGTGGC | 128 |
| 62 | Ebox/CATATG | ACCATATGT | 129 |
| 63 | Ebox/CAGATGG | AAGGAAACAGATGG | 130 |
| 64 | HEN1 | GGGAGCAGCTGCGTCC | 131 |
| 65 | Ebox/CAGCTG | ACAGCTGCT | 132 |
| 66 | SCRT1 | GCAACAGGTG | 133 |
| 67 | SNAI2 | CAGGTG | 134 |
| 68 | Ebox/CACCTG | ACACCTG | 135 |
| 69 | MIES | TGACAGCTGTCA | 136 |
| 70 | TBX/1 | TCACACCTAGGTGTGA | 137 |
| 71 | TBX/2 | GTGTGAAATTTCACACC | 138 |
| 72 | TBX/3 | TCACACCTCCAAAGGTGT | 139 |
| 73 | TBX/4 | ACCTAAAAGGTGTG | 140 |
| | | AAATTCACA | |
| 74 | SREBF1 | GTGGGGTGA | 141 |
| 75 | ZNF257 | CTCTTGCCTC | 142 |
| 76 | FOX/1 | TGTGGATT | 143 |
| 77 | FOX/2 | GTAAACATGTTTAC | 144 |
| 78 | FOX/3 | GTAAACAATAAACA | 145 |
| 79 | FOX/4 | TGTTTACTTA | 146 |
| 80 | FOX/5 | GTAAACAAACAA | 147 |
| 81 | ZNF435 | TGTTAACAGAACACC | 148 |
| 82 | POU/2 | TGCATAATTAAT | 149 |
| 83 | POU/3 | CATGAATATTCA | 150 |
| 84 | OCT4 + SOX2 | CTTTGTTATGCAAA | 151 |
| 85 | POU/1 | TATGCAAAT | 152 |
| 86 | ARI5B | TTAGTATTGT | 153 |
| 87 | FOX/6 | GTAAATATTTAC | 154 |
| 88 | ARISA | AATATTGC | 155 |
| 89 | SOX/1 | AGGAGCCTTTGTT | 156 |
| 90 | DMRT1 | GATACAATGTAGC | 157 |
| 91 | SOX/2 | ATTGTT | 158 |
| 92 | SOX/3 | TGAATTGCATTCA | 159 |
| 93 | SOX/4 | AACAATTGCAGTGTT | 160 |
| 94 | SOX/5 | ATCAATTGCATTGA | 161 |
| 95 | SPI | AAAGAGGAAGTA | 162 |
| 96 | ETS/2 | AGCAGGAAGTG | 163 |
| 97 | MECP2 | CCCGGAG | 164 |
| 98 | ETS/1 | ACCGGAAGTG | 165 |
| 99 | NFAT/2 | GAAAATAATTTTCCA | 166 |
| 100 | NFAT/1 | GGAAAATTT | 167 |
| 101 | NFAC/2 | AAAGAAAAAAAG | 168 |
| 102 | NFAT/3 | TTTCCATAATGGAAA | 169 |
| 103 | IRF/3 | CCGAAACCGAAA | 170 |
| 104 | IRF/1 | CGAAACCGAAAC | 171 |
| 105 | PRDM1 | AAAGTGAAAGT | 172 |
| 106 | IRF/2 | AAAGTGAAAGTGAAAG | 173 |
| 107 | ZNF28 | TCTATTTCTTCTTGTGTCA | 174 |
| 108 | ZIM3 | GGGTTTCTGTTGCT | 175 |
| 109 | KLF/SP/2 | GGGGGGGGGCGGGGCCG | 176 |
| 110 | ZIC/2 | GGGGGGGG | 177 |
| 111 | EGR | ACGCCCACGCA | 178 |
| 112 | KLF/SP/1 | GCCACGCCCCC | 179 |
| 113 | GC-tract | GGGGAGGAGGGGGGGGGGGA | 180 |
| 114 | MZF1 | AAAGGGGACAGGCAGG | 181 |
| 115 | ZNF324 | TCAAACCATCCTTTGCTGC | 182 |
| 116 | PRDM5 | TGGAGAGCAGGG | 183 |
| 117 | EWSR1/FLI1 | GGAAGGAAGGAAGGAAG | 184 |
| 118 | ZNF436 | CAGGGAAGGCTTCCTGGAGGA | 185 |
| | | GG | |
| 119 | ZNF528 | AGGGAAGCCATTTCT | 186 |
| 120 | LEF1 | TCCTTTGATTTGC | 187 |
| 121 | ZNF354 | CCAATTCAATTATTTT | 188 |
| | | CCATTTAAT | |
| 122 | FEZF1 | TGCTCTTTT | 189 |
| 123 | ZNF274 | CATACTGGAGAGAAACCCTA | 190 |
| 124 | ZNF41 | ACAAGGGAGTAAGGCACCATG | 191 |
| | | A | |
| 125 | SMARCA5 | AATGGAATCGAATGGAATC | 192 |
| 126 | ZNF418 | TGCTTTTAGCCTCT | 193 |
| 127 | ZNF85 | AGAAAACTGAAGTAATC | 194 |
| 128 | NFI/3 | TGGCACGGTGCCA | 195 |
| 129 | SMAD | CTGTCACCTG | 196 |
| 130 | OSR2 | GCTGCTTCTGC | 197 |
| 131 | PRDM9 | AGATGGCAGCAGCATC | 198 |
| 132 | THAP1 | TGCCCGCA | 199 |
| 133 | ZSCAN3 | GCAGCAGGGCAGTTA | 200 |
| 134 | ZNF549 | TCATGAATTGGGCAGC | 201 |
| 135 | ZNF134 | CCTCACCTAATCAGTTGAAG | 202 |
| 136 | ZNF708 | TAATAAGCAGGTACAGC | 203 |
| 137 | ZNF768 | GGCTCAGAGAGGTTAAG | 204 |
| 138 | BATF | GTTTCAATATGACT | 205 |
| 139 | AIRE | TGGTTTTATTGGTTA | 206 |
| 140 | ZNF563 | GGATCCTCACTGGCAGCTG | 207 |
| 141 | ZNF667 | TGGCCTTAAAAGCTCAGC | 208 |
| 142 | ZNF554 | CTGAGCCATGTGGGGTGC | 209 |
| 143 | ZNF140 | ACCCAGCAATTCCGCTCC | 210 |
| 144 | ZFX | CCAGGCCTCGG | 211 |
| 145 | YY1 | AAAATGGCGGC | 212 |
| 146 | ZBTB6 | GGTGCTGGAGCC | 213 |
| 147 | SMAD | TGTCTGGCACC | 214 |
| 148 | HAND1 | GTCTGGCATTTGTC | 215 |
| 149 | PRDM14 | GGTTAGAGACC | 216 |
| 150 | SPZ1 | AGGGTAACAGC | 217 |
| 151 | REST/NRSF | CAGCACCATGGACAGCGC | 218 |
| 152 | ZNF332 | AGCCTGGTACAGAGCCT | 219 |
| 153 | ZNF335 | GCTGTCCTCGGCGCTGCCTG | 220 |
| 154 | ZNF382 | TAGGGTCTGTAGTGATGTCTC | 221 |
| 155 | KAISO | AATCTCGCGAGA | 222 |
| 156 | E2F/2 | GGCGGGAA | 223 |
| 157 | E2F/3 | TTTCCCGCCAAA | 224 |
| 158 | E2F/4 | GCGCCAAA | 225 |
| 159 | NFKB/3 | AAGGGAAATTCC | 226 |
| 160 | NFKB/1 | GGAAATCCCC | 227 |
| 161 | NFKB/2 | GGGGAATCCCC | 228 |
| 162 | REL-halfsite | GGGGAAT | 229 |
| 163 | ZNF282 | TTTCCCACAACACG | 230 |
| 164 | FOX/7 | TTCCCCACAC | 231 |
| 165 | RBPJ | GTGGGAAAA | 232 |
| 166 | TEAD | ACATTCCAGGCAT | 233 |
| 167 | STAT/1 | TTCTCAGGAA | 234 |
| 168 | NFAT/4 | TTTCCATGGAAA | 235 |
| 169 | BCL6/1 | TGCTTTCTAGGAATTC | 236 |
| 170 | BCL6/2 | CTTTCTAGGAA | 237 |
| 171 | STAT/2 | TTCCAGGAA | 238 |
| 172 | ZNF143 | ACCCACAATGCATT | 239 |
| 173 | ZNF143 | GCATGCTGGGAGTTGTAGT | 240 |
| 174 | EBF1 | TCCCAAGGGA | 241 |
| 175 | ZBTB48 | TAGGGACCG | 242 |
| 176 | PRDM16 | CCCAGGGG | 243 |
| 177 | ZNF423 | GCACCCAGGGGTGC | 244 |
| 178 | RUNX/2 | ACCGCAAAAACCGC | 245 |
| 179 | RUNX/1 | GTCTGTGGTT | 246 |
| 180 | SIX/1 | GAAACCTGATA | 247 |
| 181 | GFI | CTGTGATT | 248 |
| 182 | TATA | TATAAAAGG | 249 |
| 183 | MEF2 | CTATTTTTAG | 250 |
| 184 | SRF | ACCATATATGGTC | 251 |
| 185 | HLTF | CCTTAT | 252 |
| 186 | E2F/1 | AAATGGCGCCAAAA | 253 |
| 187 | HIC/1 | TGCCAACCTATGCC | 254 |
| 188 | NFI/2 | TGCCAA | 255 |
| 189 | NFI/1 | TTGGCACGGTGCCA | 256 |
| 190 | SOX/6 | AACAATGTGCAGTGTT | 257 |
| 191 | SOX/7 | ATCAATGTGCAGTGAT | 258 |
| 192 | NRF1 | TGCGCATGCGC | 259 |
| 193 | ZNF384/1 | GAAAAAA | 260 |
| 194 | ZNF384/2 | AAAAAAA | 261 |
| 195 | HOMEZ | AAACGATTAT | 262 |
| 196 | IRF/4 | AAACGAAAATCGATT | 263 |
| 197 | ZNF586 | AGGCCTAGGAGGAAAAAATG | 264 |
| 198 | ZNF24 | ATTCATTCATT | 265 |
| 199 | MFZ1 | TAGGGGGA | 266 |
| 200 | CENBP | CCCGCATACAACGAA | 267 |
| 201 | GCM | ATGCGGGTACC | 268 |
| 202 | SOX/8 | TGAATGTGCAGTCA | 269 |
| 203 | FOX/8 | CGGACACAAT | 270 |
| 204 | HD/23 | TACATGACAT | 271 |
| 205 | HD/24 | CGCTGTAAA | 272 |
| 206 | MTF1 | TTTGCACACGGCAC | 273 |
| 207 | SMAD | GTCTAGAC | 274 |
| 208 | ZNF146 | TTTCATGGCTGCATA | 275 |
| | | GTATTCC | |
| 209 | HSFY2 | TCGAAACGTTCGAA | 276 |
| 210 | HD/25 | CTAGTTAA | 277 |
| 211 | SPDEF/1 | TGGTCCCGGATCA | 278 |
| 212 | SPDEF/2 | CAGAAAGAAGTAAA | 279 |
| 213 | ZNF524 | CCCTCGAACCC | 280 |
| 214 | DMRT3 | TGTATCA | 281 |
| 215 | DDIT3 + CEBPA | TGCAATCCC | 282 |
| 216 | NR2E3 | AAGCTT | 283 |
| 217 | ZBTB14 | GAGCGCGC | 284 |
| 218 | ZNF57 | TGCGGCA | 285 |
| 219 | ZNF250 | ACCATGCTGTTTTGATTA | 286 |
| 220 | ZNF490 | GGGTCTCTTGAAGGCAGCATA | 287 |
| 221 | ZNF53 | ATCCAC | 288 |
| 222 | ZNF784 | GTACCTACCT | 289 |
| 223 | GMEB2/1 | ACGTAACCACGTA | 290 |
| 224 | LIN54 | TTTGAAT | 291 |
| 225 | PRDM4 | TTTCAAGGCCCCC | 292 |
| 226 | ZBTB49 | TTTCGCCTGGCACGTC | 293 |
| 227 | ZNF136 | GCTGGATATAGTATTC | 294 |
| | | TTGGTT | |
| 228 | ZNF431 | ACCAACCTAAGACAGG | 295 |
| 229 | ZNF306 | GGTCTAGCCTCG | 296 |
| 230 | ZNF713 | AGAAAAATGCCACGAA | 297 |
| 231 | ZNF85 | GTGGTATATCCATACAATGGA | 298 |
| 232 | ZNF652 | AAAGGGTTAA | 299 |
| 233 | P53-like/2 | ACATGTCTATGACATGT | 300 |
| 234 | P53-like/3 | ACATGTCCATGGACATGT | 301 |
| 235 | ZNF232 | GTTAAATGTAGATTAA | 302 |
| 236 | ZNF410 | CATCCCATAATA | 303 |
| 237 | ZBED1 | TATCGCGACAT | 304 |
| 238 | PROX1 | AAGACGCCTT | 305 |
| 239 | MBD2 | GGGCCGGAG | 306 |
| 240 | OVOL1 | TGTAACTGT | 307 |
| 241 | EVI1/MECOM | AGATAAGATAAGA | 308 |
| 242 | GATA | CTTATCTGTC | 309 |
| 243 | HIC/2 | GGTTGCC | 310 |
| 244 | ZFN121 | CTGGGCAACATAGCAAGAC | 311 |
| 245 | RFX/2 | GTTGCTAGGCAAC | 312 |
| 246 | RFX/3 | GCTGTTGCCAGGC | 313 |
| 247 | RFX/1 | GTTGCCATGGCAAC | 314 |
| 248 | NR/20 | GAACATTGTGTTCC | 315 |
| 249 | HSF | TTCTAGAACGTTC | 316 |
| 250 | SMARCA1 | CAAGAAGAAT | 317 |
| 251 | ZNF680 | ATGTCCAAGAAGAATGAGG | 318 |
| 252 | MYB/5 | GGCAGTTG | 319 |
| 253 | MYB/1 | ACCGTTAACGG | 320 |
| 254 | MYB/2 | CCGTTAAAACCGTT | 321 |
| 255 | MYB/3 | ACCGTTAAACGG | 322 |
| 256 | MYB/4 | AACCGTTA | 323 |
| 257 | P53-like/l | ACATGCCCAGACATGC | 324 |
| 258 | GRHL | GAAAAACCGGTT | 325 |
| 259 | TFCP2 | CCGGTTCAAACCGGT | 326 |
| 260 | ZNF329 | CTGGATCCAGCCATGCCTGA | 327 |
| 261 | GLIS | GACCCCCCACGAAG | 328 |
| 262 | GL1 | TCGGTGGTCG | 329 |
| 263 | TFAP2/2 | GCCCTGAGGGC | 330 |
| 264 | TFAP2/1 | GCCTGAGGC | 331 |
| 265 | CTCF | CCACCAGGGGGCGC | 332 |
| 266 | INSM1 | TGTCAGGGGGCA | 333 |
| 267 | ZBTB7A | GGGGTCT | 334 |
| 268 | PLAG1 | GGGGCCCAAGGGGG | 335 |
| 269 | ZNF320 | GTGGGACCAGGGGGCCAGT | 336 |
| 270 | ZNF331 | GGCTGGGCTCAGCTGGGTG | 337 |
| 271 | ZNF449 | GGTTGGGCT | 338 |
| 272 | ZKSCAN1 | GGACCTACTGTGTG | 339 |
| 273 | ZIC | ACCCCCCGCTGTG | 340 |
| 274 | HINFP1/1 | AACGTCCGCG | 341 |
| 275 | HINFP1/2 | GCGGACGTTGCAACGTCCGC | 342 |
| 276 | HINFP1/3 | GCGGACGTTCAACGTCCGC | 343 |
| 277 | GMEB2/2 | TACGTAA | 344 |
| 278 | GMEB2/3 | ACGTAACTGACGTA | 345 |
| 279 | FOX/9 | AATGACACAGCG | 346 |
| 280 | SIX/2 | ATAGGGTATCACT | 347 |
| 281 | PAX/1 | GTCACGCATGACTG | 348 |
| 282 | PAX/2 | GGGCAGCAGAGCGTGAC | 349 |
| 283 | PAX-halfsite | GTCACG | 350 |
| 284 | AHR | TGCGTG | 351 |
| 285 | KLF/SP/3 | CAGGGGGTG | 352 |
| 286 | ZSCAN4 | GCACACACTGAAA | 353 |
| 287 | SHAPE_ | AACCCGGAAGTGAACC | 354 |
| | positive_ | CGGAAGTG | |
| | controL_ELF2X | | |
| 288 | SHAPE_ | GCACTTTGTACAGGGT | 355 |
| | negative_ | GCCATCGG | |
| | control_1 | | |
| 289 | SHAPE_ | GTTTCTGAACTCTCAG | 356 |
| | negative_ | | |
| | control_2 | ATAGTGGG | |
| 290 | SHAPE_ | GCGGTCCAACTTAGGC | 357 |
| | negative_ | GTAAACCT | |
| | control_3 | | |
| 291 | SHAPE_ | CGATGCTACCTACTCA | 358 |
| | negative_ | GACCCACC | |
| | control_4 | | |
| 292 | SHAPE_ | ATCCCAGCTGGTTCT | 359 |
| | negative_ | TGGCGTTCT | |
| | control_5 | | |

### Example 5: Pooled Screening of Mutagenized ELF(2×) Insertion Motifs for SHAPE-Mediated Tunable Protein Expression

[0310] We explored the insertion of mutagenized ELF(2×) insertion motifs via prime editing to achieve tunable target protein expression. To do so, we used the IL2RA promoter due to our previous success in activating IL2RA protein expression and the ability to sort for its expression as a cell surface marker (FIG. 20). We mutagenized positions across the ELF motif by introducing single base substitutions at the same positions of each copy within the ELF(2×) insertion sequence. We mutated the reference bases to all other possible bases at all positions across the 12 bp ELF motif for a total of 36 unique mutagenized ELF motifs. Additionally, we included a positive control wild type ELF(2×) motif which we had previously shown to activate IL2RA protein expression, along with 5 negative control sequences (24 bp) created with a random DNA generator. All mutagenized ELF(2×) motifs and control sequences were inserted at the same position within the IL2RA promoter using the pegRNA spacer sequence and ngRNA described previously (Table B, C). The pegRNA constructs encoding all mutagenized ELF(2×) motifs and control sequences, in addition to the ngRNA, were pooled and double-electroporated into K562 with the electroporation events separated by 72 hours. Seven days after the second electroporation event, the K562 cells were sorted based on IL2RA protein expression into negative and positive populations. Genomic DNA was harvested from both the IL2RA negative and positive populations and targeted amplicon sequencing was performed at the prime editing insertion location. Each mutagenized ELF(2×) motif was counted within the sequencing reads in both the negative and positive samples, normalized based on total read count in each sample, and an enrichment score was calculated (FIG. 23). We found that our positive control wild-type ELF(2×) motif exhibited the highest positive enrichment (FIG. 23, black), whereas the 5 negative controls showed the most negative enrichment (FIG. 23, dark grey). The different ELF motif single-base variants ((FIG. 23, light grey) exhibited varying degrees of enrichment, suggesting the ability of SHAPE to tune target protein expression by mutagenizing transcription factor motifs.

TABLE F
Single-base mutagenized ELF motifs for
tuning of target gene activation

| Motif name | Motif sequence | SEQ ID NO: |
|---|---|---|
| ELF 1 mutagenesis | BACCCGGAAGTG | 360 |
| ELF 2 mutagenesis | ABCCCGGAAGTG | 361 |
| ELF 3 mutagenesis | AADCCGGAAGTG | 362 |
| ELF 4 mutagenesis | AACDCGGAAGTG | 363 |
| ELF 5 mutagenesis | AACCDGGAAGTG | 364 |
| ELF 6 mutagenesis | AACCCHGAAGTG | 365 |
| ELF 7 mutagenesis | AACCCGHAAGTG | 366 |
| ELF 8 mutagenesis | AACCCGGBAGTG | 367 |
| ELF 9 mutagenesis | AACCCGGABGTG | 368 |
| ELF 10 mutagenesis | AACCCGGAAHTG | 369 |
| ELF 11 mutagenesis | AACCCGGAAGVG | 370 |
| ELF 12 mutagenesis | AACCCGGAAGTH | 371 |

[0311] Taken together, these results show that it is possible to use precision genome engineering via prime editing to install functional transcription factor binding sites, to ultimately promote heritable gene activation.

TABLE G
SNPs that affect microRNA binding sites which are associated with autoimmune diseases.
Table 2 taken from De Almeida et al, Frontiers in Genetics 2018, 9:139. doi: 10.3389/fgene.2018.00139.
eCollection 2018.

| | | | | | | | | | | | Effect | | eQTL |
|---|---|---|---|---|---|---|---|---|---|---|---|---|---|
| | | | Ref. | Minor | | | P- | | Target | | on | | (effect |
| miRSNP | chr | pos_bp(hg38) | allele | allele | MAF | Disease | value | OR | gene | miRNA | miRNA | NBS | direction) |
| rs7559479 | 2 | 102452327 | A | G | 0.22 | Crohn's | 2.2e−10 | 1.15 | IL18RAP | hsa- | C | 0.79 | Yes (up) |
| | | | | | | disease | | | | miR- | | | |
| | | | | | | | | | | 3156-3p | | | |
| | | | | | | Celiac | 1.4e−16 | 1.19 | | hsa- | C | 0.86 | |
| | | | | | | disease | | | | miR- | | | |
| | | | | | | | | | | 4301 | | | |
| | | | | | | Inflammatory | NA | NA | | hsa- | C | 0.92 | |
| | | | | | | bowel | | | | miR- | | | |
| | | | | | | disease | | | | 136 | | | |
| rs7603250 | 2 | 102452374 | A | T | 0.22 | Crohn's | 1.6e−10 | 0.8 | IL18RAP | hsa- | C | 0.94 | Yes (up) |
| | | | | | | disease | | | | miR- | | | |
| | | | | | | | | | | 455- | | | |
| | | | | | | | | | | 3p | | | |
| | | | | | | Inflammatory | 1.8e−09 | 0.8 | | | | | |
| | | | | | | bowel | | | | | | | |
| | | | | | | disease | | | | | | | |
| | | | | | | Celiac | NA | NA | | | | | |
| | | | | | | disease | | | | | | | |
| rs3732421 | 3 | 119431242 | A | G | 0.16 | Multiple | 3.5e−12 | 0.85 | TMEM39A | hsa- | D | 0.72 | No |
| | | | | | | sclerosis | | | | miR- | | | |
| | | | | | | | | | | 449b- | | | |
| | | | | | | | | | | 3p | | | |
| | | | | | | Primary | 1.7e−11 | 0.72 | | hsa- | D | 0.82 | |
| | | | | | | biliary | | | | miR- | | | |
| | | | | | | cirrhosis | | | | 4691- | | | |
| | | | | | | | | | | 3p | | | |
| | | | | | | | | | | hssa- | D | 0.92 | |
| | | | | | | | | | | miR- | | | |
| | | | | | | | | | | 449b | | | |
| rs57271503 | 3 | 119525746 | G | A | 0.16 | Multiple | 4.1e−15 | 0.84 | CD80 | hsa- | C | 0.71 | No |
| | | | | | | sclerosis | | | | miR- | | | |
| | | | | | | | | | | 769- | | | |
| | | | | | | | | | | 5p | | | |
| | | | | | | Primary | 9.4e−13 | 0.71 | | hsa- | C | 0.80 | |
| | | | | | | biliary | | | | miR- | | | |
| | | | | | | cirrhosis | | | | 4802- | | | |
| | | | | | | | | | | 5p | | | |
| | | | | | | | | | | hsa- | C | 0.71 | |
| | | | | | | | | | | miR- | | | |
| | | | | | | | | | | 769- | | | |
| | | | | | | | | | | 5p | | | |
| rs1054037 | 4 | 102631552 | T | C | 0.49 | Primary | 8.3e−10 | 0.82 | MANBA | hsa- | D | 0.90 | Yes |
| | | | | | | biliary | | | | miR- | | | (down/ |
| | | | | | | cirrhosis | | | | 660 | | | up) |
| | | | | | | Multiple | NA | NA | | hsa- | D | 0.95 | |
| | | | | | | sclerosis | | | | miR- | | | |
| | | | | | | | | | | 5591- | | | |
| | | | | | | | | | | 3p | | | |
| | | | | | | | | | | hsa- | D | 0.82 | |
| | | | | | | | | | | miR- | | | |
| | | | | | | | | | | 660- | | | |
| | | | | | | | | | | 5p | | | |
| | | | | | | | | | | hsa- | C | 0.71 | |
| | | | | | | | | | | miR- | | | |
| | | | | | | | | | | 7151- | | | |
| | | | | | | | | | | 5p | | | |
| | | | | | | | | | | hsa- | C | 0.94 | |
| | | | | | | | | | | miR- | | | |
| | | | | | | | | | | 3686 | | | |
| rs4013 | 4 | 102631656 | T | C | 0.51 | Primary | NA | NA | MANBA | hsa- | C | 0.76 | Yes |
| | | | | | | biliary | | | | miR- | | | (down/ |
| | | | | | | cirrhosis | | | | 4742- | | | up) |
| | | | | | | | | | | 3p | | | |
| | | | | | | Multiple | NA | NA | | hsa- | C | 0.91 | |
| | | | | | | sclerosis | | | | miR- | | | |
| | | | | | | | | | | 4778- | | | |
| | | | | | | | | | | 5p | | | |
| | | | | | | | | | | hsa- | C | 0.82 | |
| | | | | | | | | | | miR- | | | |
| | | | | | | | | | | 630 | | | |
| rs1054029 | 4 | 102631896 | A | G | 0.51 | Primary | NA | NA | MANBA | hsa- | D | 0.80 | Yes |
| | | | | | | biliary | | | | miR- | | | (down/ |
| | | | | | | cirrhosis | | | | 124- | | | up) |
| | | | | | | | | | | 5p | | | |
| | | | | | | Multiple | NA | NA | | hsa- | D | 0.99 | |
| | | | | | | sclerosis | | | | miR- | | | |
| | | | | | | | | | | 4255- | | | |
| | | | | | | | | | | hsa- | D | 0.74 | |
| | | | | | | | | | | miR- | | | |
| | | | | | | | | | | 4766- | | | |
| | | | | | | | | | | 5p | | | |
| | | | | | | | | | | hsa- | D | 0.90 | |
| | | | | | | | | | | miR- | | | |
| | | | | | | | | | | 124 | | | |
| | | | | | | | | | | hsa- | D | 0.77 | |
| | | | | | | | | | | miR- | | | |
| | | | | | | | | | | 33a | | | |
| rs39602 | 5 | 97028750 | G | C | 0.41 | Ankylosing | NA | NA | LNPEP | hsa- | D | 0.99 | Yes |
| | | | | | | spondylitis | | | | miR- | | | (down) |
| | | | | | | | | | | 6800- | | | |
| | | | | | | | | | | 5p | | | |
| | | | | | | Crohn's | 6.9e−11 | 1.1 | | | | | |
| | | | | | | disease | | | | | | | |
| | | | | | | Juvenile | NA | NA | | | | | |
| | | | | | | idiopathic | | | | | | | |
| | | | | | | arthritis | | | | | | | |
| rs2070197 | 7 | 128948946 | T | C | 0.1 | Systemic | 3.0e−40 | 1.7 | IRF5 | hsa- | D | 0.91 | Yes |
| | | | | | | lupus | | | | miR- | | | (up) |
| | | | | | | erythematosus | | | | 3136- | | | |
| | | | | | | | | | | 3p | | | |
| | | | | | | Primary | | | | hsa- | D | 0.89 | |
| | | | | | | biliary | | | | miR- | | | |
| | | | | | | cirrhosis | | | | 7155- | | | |
| | | | | | | | | | | 3p | | | |
| rs10114470 | 9 | 114785492 | C | T | 0.33 | Crohn's | 1.5e−15 | 1.1 | TNFSF15 | hsa- | D | 0.84 | Yes |
| | | | | | | disease | | | | miR- | | | (up) |
| | | | | | | | | | | 376a- | | | |
| | | | | | | | | | | 3p | | | |
| | | | | | | Inflammatory | 1.5e−15 | 0.8 | | hsa- | D | 0.74 | |
| | | | | | | bowel | | | | miR- | | | |
| | | | | | | disease | | | | 4753- | | | |
| | | | | | | | | | | 5p | | | |
| rs3088081 | 9 | 136375697 | A | G | 0.42 | Inflammatory | 1.9e−22 | 0.8 | SNAPC4 | hsa- | C | 0.80 | Yes |
| | | | | | | bowel | | | | miR- | | | (down) |
| | | | | | | disease | | | | 3661 | | | |
| | | | | | | Crohn's | 2.1e−17 | 0.8 | | | | | |
| | | | | | | disease | | | | | | | |
| | | | | | | Ulcerative | 1.0e−11 | 0.8 | | | | | |
| | | | | | | colitis | | | | | | | |
| rs9943 | 13 | 39752145 | A | G | 0.34 | Juvenile | NA | NA | COG6 | hsa- | C | 0.98 | Yes |
| | | | | | | idiopathic | | | | miR- | | | (down) |
| | | | | | | arthritis | | | | 628- | | | |
| | | | | | | Rheumatoid | NA | NA | | 5p | | | |
| | | | | | | arthritis | | | | | | | |
| rs3839999 | 13 | 99385548 | AT | A | 0.22 | Crohn's | NA | NA | UBAC2 | hsa- | C | 0.93 | No |
| | | | | | | disease | | | | miR- | | | |
| | | | | | | Inflammatory | NA | NA | | 365a- | | | |
| | | | | | | bowel | | | | 3p | | | |
| | | | | | | disease | | | | | | | |
| rs907091 | 17 | 39765489 | C | T | 0.51 | Primary | 1.0e−10 | 0.7 | IKZF3 | hsa- | D | 0.97 | Yes |
| | | | | | | biliary | | | | miR- | | | (down) |
| | | | | | | cirrhosis | | | | 4497 | | | |
| | | | | | | Type 1 | NA | NA | | hsa- | C | 0.85 | |
| | | | | | | diabetes | | | | miR- | | | |
| | | | | | | mellitus | | | | 3649 | | | |
| | | | | | | Ulcerative | 8.1e−09 | 0.8 | | hsa- | C | 0.92 | |
| | | | | | | colitis | | | | miR- | | | |
| | | | | | | | | | | 4518 | | | |
| | | | | | | Inflammatory | 3.3e−13 | 0.8 | | hsa- | C | 0.99 | |
| | | | | | | bowel | | | | miR- | | | |
| | | | | | | disease | | | | 330- | | | |
| | | | | | | | | | | 5p | | | |
| | | | | | | | | | | hsa- | C | 0.86 | |
| | | | | | | | | | | miR- | | | |
| | | | | | | | | | | 518c | | | |
| | | | | | | | | | | hsa- | C | 0.84 | |
| | | | | | | | | | | miR- | | | |
| | | | | | | | | | | 4314 | | | |
| | | | | | | | | | | hsa- | C | 0.99 | |
| | | | | | | | | | | miR- | | | |
| | | | | | | | | | | 326 | | | |
| | | | | | | | | | | hsa- | C | 0.73 | |
| | | | | | | | | | | miR- | | | |
| | | | | | | | | | | 3192 | | | |
| rs16940681 | 17 | 45834793 | G | C | 0.24 | Primary | NA | NA | CRHR1 | hsa- | D | 0.84 | Yes (up) |
| | | | | | | biltary | | | | miR- | | | |
| | | | | | | cirrhosis | | | | 6740-5p | | | |
| | | | | | | Type 1 | NA | NA | | | | | |
| | | | | | | diabetes | | | | | | | |
| | | | | | | mellitus | | | | | | | |
| rs2316765 | 17 | 45835088 | T | C | 0.24 | Primary | NA | NA | CRHR1 | hsa- | D | 0.73 | Yes (up) |
| | | | | | | biltary | | | | miR- | | | |
| | | | | | | cirrhosis | | | | 3192 | | | |
| | | | | | | Type 1 | NA | NA | | hsa- | D | 0.97 | |
| | | | | | | diabetes | | | | miR- | | | |
| | | | | | | mellitus | | | | 30c-2- | | | |
| | | | | | | | | | | 3p | | | |
| | | | | | | | | | | hsa- | D | 0.90 | |
| | | | | | | | | | | miR- | | | |
| | | | | | | | | | | 30c-1- | | | |
| | | | | | | | | | | 3p | | | |
| rs878886 | 17 | 45835124 | C | G | 0.24 | Primary | NA | NA | CRHR1 | hsa- | D | 0.96 | Yes (up) |
| | | | | | | biltary | | | | miR- | | | |
| | | | | | | cirrhosis | | | | 4685- | | | |
| | | | | | | Type 1 | NA | NA | | 5p | | | |
| | | | | | | diabetes | | | | hsa- | D | 0.71 | |
| | | | | | | mellitus | | | | miR- | | | |
| | | | | | | | | | | 1915- | | | |
| | | | | | | | | | | 3p | | | |
| | | | | | | | | | | hsa- | D | 0.86 | |
| | | | | | | | | | | miR- | | | |
| | | | | | | | | | | 3918 | | | |
| | | | | | | | | | | hsa- | D | 0.76 | |
| | | | | | | | | | | miR- | | | |
| | | | | | | | | | | 7160- | | | |
| | | | | | | | | | | 3p | | | |
| rs878887 | 17 | 45835216 | C | T | 0.24 | Primary | NA | NA | CRHR1 | hsa- | C | 0.85 | Yes (up) |
| | | | | | | biltary | | | | miR- | | | |
| | | | | | | cirrhosis | | | | 198 | | | |
| | | | | | | Type 1 | NA | NA | | hsa- | D | 0.88 | |
| | | | | | | diabetes | | | | miR- | | | |
| | | | | | | mellitus | | | | 3186- | | | |
| | | | | | | | | | | 5p | | | |
| | | | | | | | | | | hsa- | C | 0.92 | |
| | | | | | | | | | | miR- | | | |
| | | | | | | | | | | 136 | | | |
| rs878888 | 17 | 45835269 | A | G | 0.24 | Primary | NA | NA | CRHR1 | hsa- | C | 0.70 | Yes (up) |
| | | | | | | biltary | | | | miR- | | | |
| | | | | | | cirrhosis | | | | 5708 | | | |
| | | | | | | Type 1 | NA | NA | | hsa- | D | 0.72 | |
| | | | | | | diabetes | | | | miR- | | | |
| | | | | | | mellitus | | | | 1226- | | | |
| | | | | | | | | | | 5p | | | |
| rs4640231 | 17 | 45835420 | G | C | 0.24 | Primary | NA | NA | CRHR1 | hsa-miR- | D | 0.81 | Yes (up) |
| | | | | | | biltary | | | | 6841-5p | | | |
| | | | | | | cirrhosis | | | | | | | |
| | | | | | | Type 1 | NA | NA | | hsa-miR- | D | 0.77 | |
| | | | | | | diabetes | | | | 6755-5p | | | |
| | | | | | | mellitus | | | | | | | |
| rs54482334 | 17 | 45835464 | T | C | 0.24 | Primary | NA | NA | CRHR1 | hsa-miR- | D | 0.93 | Yes (up) |
| | | | | | | biltary | | | | 6890-5p | | | |
| | | | | | | cirrhosis | | | | | | | |
| | | | | | | Type 1 | NA | NA | | hsa-miR- | D | 0.94 | |
| | | | | | | diabetes | | | | 6742-5p | | | |
| | | | | | | mellitus | | | | | | | |
| | | | | | | | | | | hsa-miR- | D | 0.77 | |
| | | | | | | | | | | 4722-5p | | | |
| | | | | | | | | | | hsa-miR- | D | 0.75 | |
| | | | | | | | | | | 6796-5p | | | |
| | | | | | | | | | | hsa-miR- | D | 0.80 | |
| | | | | | | | | | | 4459 | | | |
| rs12373168 | 17 | 45846971 | A | C | 0.24 | Primary | NA | NA | SPPL2C | hsa-miR- | D | 0.87 | No |
| | | | | | | biltary | | | | 33b-3p | | | |
| | | | | | | cirrhosis | | | | | | | |
| | | | | | | Type 1 | NA | NA | | hsa-miR- | D | 0.87 | |
| | | | | | | diabetes | | | | 519e-3p | | | |
| | | | | | | mellitus | | | | | | | |
| rs60474474 | 18 | 12792737 | C | T | 0.14 | Inflammatory | 1.4e−10 | 1.1 | PTPN2 | hsa-miR- | D | 0.99 | No |
| | | | | | | bowel | | | | 4290 | | | |
| | | | | | | disease | | | | | | | |
| | | | | | | Crohn's | 2.2e−12 | 1.2 | | | | | |
| | | | | | | disease | | | | | | | |
| | | | | | | Type 1 | NA | NA | | | | | |
| | | | | | | diabetes | | | | | | | |
| | | | | | | mellitus | | | | | | | |
| | | | | | | Celiac | NA | NA | | | | | |
| | | | | | | disease | | | | | | | |
| | | | | | | Juvenile | NA | NA | | | | | |
| | | | | | | idiopathic | | | | | | | |
| | | | | | | arthritis | | | | | | | |
| rs45450798 | 18 | 12792941 | C | G | 0.14 | Inflammatory | 2.0e−10 | 0.8 | PTPN2 | hsa-miR- | D | 0.73 | No |
| | | | | | | bowel | | | | 4531 | | | |
| | | | | | | disease | | | | | | | |
| | | | | | | Crohn's | 2.9e−12 | 0.8 | | | | | |
| | | | | | | disease | | | | | | | |
| | | | | | | Type 1 | NA | NA | | | | | |
| | | | | | | diabetes | | | | | | | |
| | | | | | | mellitus | | | | | | | |
| | | | | | | Celiac | NA | NA | | | | | |
| | | | | | | disease | | | | | | | |
| | | | | | | Juvenile | NA | NA | | | | | |
| | | | | | | idiopathic | | | | | | | |
| | | | | | | arthritis | | | | | | | |
| rs9950174 | 18 | 69846569 | T | C | 0.53 | Psoriasis | NA | NA | CD226 | hsa-miR- | D | 0.85 | Yes |
| | | | | | | | | | | 5189-3p | | | (up) |
| rs727088 | 18 | 69863203 | G | A | 0.53 | Inflammatory | 4.6e−9 | 1.08 | CD226 | hsa-miR- | D | 0.75 | Yes |
| | | | | | | bowel | | | | 513a-3p | | | (up) |
| | | | | | | disease | | | | | | | |
| | | | | | | Ulcerative | 1.9e−8 | 1.1 | | hsa-miR- | D | 0.75 | |
| | | | | | | colitis | | | | 181c | | | |
| | | | | | | Psoriasis | NA | NA | | | | | |
| rs571689 | 19 | 48704297 | C | T | 0.47 | Crohn's | 7.3e−09 | 1.1 | FUT2 | hsa-miR- | D | 0.89 | Yes |
| | | | | | | disease | | | | 648 | | | (down) |
| | | | | | | Type 1 | NA | NA | | hsa-miR- | C | 0.92 | |
| | | | | | | diabetes | | | | 552-3p | | | |
| | | | | | | mellitus | | | | | | | |
| rs570794 | 19 | 48704394 | T | C | 0.47 | Crohn's | 1.0e−08 | 0.8 | FUT2 | hsa-miR- | D | 0.71 | Yes |
| | | | | | | disease | | | | 4430 | | | (down) |
| | | | | | | Type 1 | NA | NA | | hsa-miR- | C | 0.79 | |
| | | | | | | diabetes | | | | 1295b- | | | |
| | | | | | | mellitus | | | | 5p | | | |
| | | | | | | | | | | hsa-miR- | C | 0.95 | |
| | | | | | | | | | | 4463 | | | |
| | | | | | | | | | | hsa-miR- | C | 0.94 | |
| | | | | | | | | | | 1912 | | | |
| rs507766 | 19 | 48705286 | T | C | 0.47 | Crohn's | 1.4e−08 | 0.8 | FUT2 | hsa-miR- | C | 0.83 | Yes |
| | | | | | | disease | | | | 136-5p | | | (down) |
| | | | | | | Type 1 | NA | NA | | hsa- | C | 0.80 | |
| | | | | | | diabetes | | | | miR- | | | |
| | | | | | | mellitus | | | | 675 | | | |
| | | | | | | | | | | hsa-miR- | C | 0.92 | |
| | | | | | | | | | | 887 | | | |
| | | | | | | | | | | hsa-miR- | C | 0.73 | |
| | | | | | | | | | | 410 | | | |
| | | | | | | | | | | hsa-miR- | C | 0.75 | |
| | | | | | | | | | | 191 | | | |
| rs506897 | 19 | 48705372 | G | C | 0.47 | Crohn's | 7.3e−09 | 1.1 | FUT2 | hsa-miR- | C | 0.81 | Yes |
| | | | | | | disease | | | | 4530 | | | (down) |
| | | | | | | Type 1 | NA | NA | | | | | |
| | | | | | | diabetes | | | | | | | |
| | | | | | | mellitus | | | | | | | |
| rs503279 | 19 | 48705753 | T | C | 0.47 | Crohn's | 6.7e−09 | 0.8 | FUT2 | hsa-miR- | C | 0.86 | Yes |
| | | | | | | disease | | | | 675-3p | | | (down) |
| | | | | | | Type 1 | NA | NA | | | | | |
| | | | | | | diabetes | | | | | | | |
| | | | | | | mellitus | | | | | | | |
| rs1056441 | 20 | 63738996 | C | T | 0.28 | Crohn's | 5.4e−11 | 0.8 | LIME1 | hsa-miR- | C | 0.97 | Yes |
| | | | | | | disease | | | | 4745-3p | | | (down) |
| | | | | | | Inflammatory | 1.5e−15 | 0.8 | | hsa-miR- | C | 0.97 | |
| | | | | | | bowel disease | | | | 1538 | | | |
| | | | | | | | | | | hsa-miR- | C | 0.87 | |
| | | | | | | | | | | 4467 | | | |
| | | | | | | | | | | hsa-miR- | C | 0.78 | |
| | | | | | | | | | | 6770-3p | | | |
| | | | | | | | | | | hsa-miR- | D | 0.82 | |
| | | | | | | | | | | 3940-3p | | | |
| | | | | | | | | | | hsa-miR- | D | 0.94 | |
| | | | | | | | | | | 762 | | | |
| rs7444 | 22 | 21622645 | T | C | 0.2 | Systemic | 1.8e−22 | 1.27 | UBE2L3 | hsa-miR- | D | 0.90 | Yes |
| | | | | | | lupus | | | | 4741 | | | (up) |
| | | | | | | erythematosus | | | | | | | |
| | | | | | | Crohn's | 1.3e−12 | 1.1 | | hsa-miR- | D | 0.89 | |
| | | | | | | disease | | | | 4763-3p | | | |
| | | | | | | Inflammatory | 6.9e−10 | 0.8 | | hsa-miR- | D | 0.86 | |
| | | | | | | bowel disease | | | | 3918 | | | |
| | | | | | | | | | | hsa-miR- | D | 0.92 | |
| | | | | | | | | | | 1207-5p | | | |
| rs7445 | 22 | 21622758 | C | T | 0.19 | Crohn's | 6.3e−09 | 1.1 | UBE2L3 | hsa-miR- | C | 0.93 | Yes |
| | | | | | | disease | | | | 3064-5p | | | (up) |
| | | | | | | Inflammatory | 3.5e−10 | 1.1 | | | | | |
| | | | | | | bowel disease | | | | | | | |
| | | | | | | Systemic | 1.0e−12 | 1.27 | | | | | |
| | | | | | | lupus | | | | | | | |
| | | | | | | erythematosus | | | | | | | |

NA, P-value was not available in the source study but this miRSNP (SNPs that can affect miRNA binding) is in linkage disequilibrium (r² ≥ 0.8) with the most associated SNP reported; P-value obtained from each study. Bold: reported as associated in the original study. C, creates a binding site; D, disrupts a binding site; chr, chromosome; MAF, global minor allele frequency from the 1000 Genomes project; up, upregulated effect; down, downregulated effect; pos bp, position in base pair; OR, odds ratio. OR was calculated based on the minor allele of the respective variant; eQTL, expression quantitative trait locus; NBC, naïve Bayes combined score.
Table 2 and legend adapted from De Almeida et al, Frontiers in Genetics 9:139 2018 (PMID 29755505)

TABLE H
Organ, tissue or cell-specific miRNAs from the miRWalk 2.0 database

| Organ/Tissue/Cell type | miRNA | MIMATid | PMID |
|---|---|---|---|
| Adherens Junctions | hsa-miR-1 | MIMAT0000416 | 23142026 |
| Adipocytes | bta-miR-29a | MIMAT0003518 | 17652184 |
| Adipocytes | bta-miR-29c | MIMAT0003829 | 17652184 |
| Adipocytes | cfa-miR-29a | MIMAT0006626 | 17652184 |
| Adipocytes | cfa-miR-29c | MIMAT0006705 | 17652184 |
| Adipocytes | dre-miR-29a | MIMAT0001802 | 17652184 |
| Adipocytes | hsa-miR-125a-5p | MIMAT0000443 | 19011087 |
| Adipocytes | hsa-miR-125b-5p | MIMAT0000423 | 19011087 |
| Adipocytes | hsa-miR-132-3p | MIMAT0000426 | 19819989 |
| Adipocytes | hsa-miR-138-5p | MIMAT0000430 | 20486779 |
| Adipocytes | hsa-miR-141-3p | MIMAT0000432 | 20005803 |
| Adipocytes | hsa-miR-143-3p | MIMAT0000435 | 15504739 |
| Adipocytes | hsa-miR-199a-5p | MIMAT0000231 | 19011087 |
| Adipocytes | hsa-miR-199a-5p | MIMAT0000231 | 22441842 |
| Adipocytes | hsa-miR-200a-3p | MIMAT0000682 | 20005803 |
| Adipocytes | hsa-miR-200b-3p | MIMAT0000318 | 20005803 |
| Adipocytes | hsa-miR-200c-3p | MIMAT0000617 | 20005803 |
| Adipocytes | hsa-miR-21-5p | MIMAT0000076 | 21381024 |
| Adipocytes | hsa-miR-26a-5p | MIMAT0000082 | 19011087 |
| Adipocytes | hsa-miR-27b-3p | MIMAT0000419 | 19800867 |
| Adipocytes | hsa-miR-346 | MIMAT0000773 | 19011087 |
| Adipocytes | hsa-miR-429 | MIMAT0001536 | 20005803 |
| Adipocytes | hsa-miR-519d-3p | MIMAT0002853 | 20057369 |
| Adipocytes | hsa-miR-637 | MIMAT0003307 | 21880893 |
| Adipocytes | mmu-miR-17-5p | MIMAT0000649 | 18287052 |
| Adipocytes | mmu-miR-204-5p | MIMAT0000237 | 20039258 |
| Adipocytes | mmu-miR-211-5p | MIMAT0000668 | 20039258 |
| Adipocytes | mmu-miR-29a-3p | MIMAT0000535 | 17652184 |
| Adipocytes | mmu-miR-29b-3p | MIMAT0000127 | 17652184 |
| Adipocytes | mmu-miR-29c-3p | MIMAT0000536 | 17652184 |
| Adipocytes | mmu-miR-448-3p | MIMAT0001533 | 20719859 |
| Adipocytes | ppy-miR-29a | MIMAT0002363 | 17652184 |
| Adipocytes | ppy-miR-29c | MIMAT0015735 | 17652184 |
| Adipocytes | ptr-miR-29a | MIMAT0002364 | 17652184 |
| Adipocytes | ptr-miR-29c | MIMAT0008082 | 17652184 |
| Adipocytes | rno-miR-29a-3p | MIMAT0000802 | 17652184 |
| Adipocytes | rno-miR-29b-3p | MIMAT0000801 | 17652184 |
| Adipocytes | rno-miR-29c-3p | MIMAT0000803 | 17652184 |
| Adipocytes | ssc-miR-29a | MIMAT0013870 | 17652184 |
| Adipocytes | ssc-miR-29c | MIMAT0002166 | 17652184 |
| Adipocytes | xtr-miR-29a | MIMAT0003656 | 17652184 |
| Adipose Tissue | hsa-miR-132-3p | MIMAT0000426 | 19819989 |
| Adipose Tissue | hsa-miR-141-3p | MIMAT0000432 | 20005803 |
| Adipose Tissue | hsa-miR-196a-5p | MIMAT0000226 | 19063684 |
| Adipose Tissue | hsa-miR-200a-3p | MIMAT0000682 | 20005803 |
| Adipose Tissue | hsa-miR-200b-3p | MIMAT0000318 | 20005803 |
| Adipose Tissue | hsa-miR-200c-3p | MIMAT0000617 | 20005803 |
| Adipose Tissue | hsa-miR-21-5p | MIMAT0000076 | 21381024 |
| Adipose Tissue | hsa-miR-21-5p | MIMAT0000076 | 19816956 |
| Adipose Tissue | hsa-miR-26a-5p | MIMAT0000082 | 18197755 |
| Adipose Tissue | hsa-miR-429 | MIMAT0001536 | 20005803 |
| Adipose Tissue | hsa-miR-519d-3p | MIMAT0002853 | 20057369 |
| Adipose Tissue | mmu-miR-200b-3p | MIMAT0000233 | 19787069 |
| Adipose Tissue | mmu-miR-200c-3p | MIMAT0000657 | 19787069 |
| Adipose Tissue | mmu-miR-346-5p | MIMAT0000597 | 19780716 |
| Adipose Tissue White | hsa-miR-21-5p | MIMAT0000076 | 21381024 |
| Adrenal Cortex | hsa-miR-200b-3p | MIMAT0000318 | 19849700 |
| Adrenal Glands | mmu-miR-101a-3p | MIMAT0000133 | 22128032 |
| Adrenal Glands | mmu-miR-142-3p | MIMAT0000155 | 22128032 |
| Adrenal Glands | mmu-miR-433-3p | MIMAT0001420 | 22128032 |
| Adrenal Glands | mmu-miR-96-5p | MIMAT0000541 | 22128032 |
| Adult Stem Cells | hsa-miR-34a-5p | MIMAT0000255 | 17252019 |
| Adult Stem Cells | mmu-miR-1a-3p | MIMAT0000123 | 20819939 |
| Adult Stem Cells | mmu-miR-206-3p | MIMAT0000239 | 20819939 |
| Amacrine Cells | hsa-miR-182-5p | MIMAT0000259 | 17597072 |
| Amacrine Cells | hsa-miR-96-5p | MIMAT0000095 | 17597072 |
| Amygdala | hsa-miR-183-5p | MIMAT0000261 | 19711202 |
| Amygdala | rno-miR-183-5p | MIMAT0000860 | 19711202 |
| Aorta | hsa-miR-10a-5p | MIMAT0000253 | 20624982 |
| Aorta | hsa-miR-21-5p | MIMAT0000076 | 22034194 |
| Aorta | mmu-miR-130a-3p | MIMAT0000141 | 21753805 |
| Aorta | mmu-miR-15a-5p | MIMAT0000526 | 21305018 |
| Aorta | mmu-miR-497-5p | MIMAT0003453 | 21305018 |
| Aorta Thoracic | hsa-miR-10a-5p | MIMAT0000253 | 20624982 |
| Aorta Thoracic | mmu-miR-130a-3p | MIMAT0000141 | 21753805 |
| Arteries | hsa-miR-1 | MIMAT0000416 | 21051663 |
| Arteries | hsa-miR-155-5p | MIMAT0000646 | 23108656 |
| Arteries | hsa-miR-195-5p | MIMAT0000461 | 22802111 |
| Arteries | hsa-miR-204-5p | MIMAT0000265 | 22871591 |
| Arteries | hsa-miR-21-5p | MIMAT0000076 | 22034194 |
| Arteries | hsa-miR-21-5p | MIMAT0000076 | 17478730 |
| Arteries | hsa-miR-221-3p | MIMAT0000278 | 19150885 |
| Arteries | hsa-miR-222-3p | MIMAT0000279 | 19150885 |
| Arteries | hsa-miR-31-5p | MIMAT0000089 | 23518389 |
| Arteries | hsa-miR-616-3p | MIMAT0004805 | 23497787 |
| Arteries | mmu-miR-100-3p | MIMAT0017051 | 21339483 |
| Arteries | mmu-miR-100-5p | MIMAT0000655 | 21339483 |
| Arteries | mmu-miR-130a-3p | MIMAT0000141 | 21753805 |
| Arteries | rno-miR-145-5p | MIMAT0000851 | 19542014 |
| Arteries | rno-miR-21-5p | MIMAT0000790 | 17478730 |
| Arteries | rno-miR-21-5p | MIMAT0000790 | 22565856 |
| Arteries | rno-miR-221-3p | MIMAT0000890 | 19150885 |
| Arteries | rno-miR-222-3p | MIMAT0000891 | 19150885 |
| Arteries | rno-miR-31a-5p | MIMAT0000810 | 19542014 |
| Arteries | rno-miR-31a-5p | MIMAT0000810 | 22020941 |
| Astrocytes | hsa-miR-125b-5p | MIMAT0000423 | 20347935 |
| Astrocytes | hsa-miR-326 | MIMAT0000756 | 20667897 |
| Astrocytes | hsa-miR-34a-5p | MIMAT0000255 | 19773441 |
| Astrocytes | mmu-miR-146a-5p | MIMAT0000158 | 21730286 |
| Astrocytes | mmu-miR-155-5p | MIMAT0000165 | 21247879 |
| Astrocytes | mmu-miR-298-5p | MIMAT0000376 | 21247879 |
| Astrocytes | mmu-miR-351-5p | MIMAT0000609 | 21247879 |
| Axons | rno-miR-338-3p | MIMAT0000581 | 19020050 |
| B-Lymphocytes | hsa-let-7a-5p | MIMAT0000062 | 18583325 |
| B-Lymphocytes | hsa-miR-107 | MIMAT0000104 | 19692702 |
| B-Lymphocytes | hsa-miR-125b-5p | MIMAT0000423 | 20497960 |
| B-Lymphocytes | hsa-miR-127-3p | MIMAT0000446 | 19530237 |
| B-Lymphocytes | hsa-miR-143-3p | MIMAT0000435 | 17892514 |
| B-Lymphocytes | hsa-miR-145-5p | MIMAT0000437 | 21360565 |
| B-Lymphocytes | hsa-miR-153-3p | MIMAT0000439 | 19676043 |
| B-Lymphocytes | hsa-miR-155-5p | MIMAT0000646 | 18262046 |
| B-Lymphocytes | hsa-miR-155-5p | MIMAT0000646 | 21062812 |
| B-Lymphocytes | hsa-miR-155-5p | MIMAT0000646 | 19759154 |
| B-Lymphocytes | hsa-miR-155-5p | MIMAT0000646 | 20427544 |
| B-Lymphocytes | hsa-miR-155-5p | MIMAT0000646 | 19177201 |
| B-Lymphocytes | hsa-miR-155-5p | MIMAT0000646 | 17881434 |
| B-Lymphocytes | hsa-miR-15a-5p | MIMAT0000068 | 21205967 |
| B-Lymphocytes | hsa-miR-16-5p | MIMAT0000069 | 21205967 |
| B-Lymphocytes | hsa-miR-17-5p | MIMAT0000070 | 20227518 |
| B-Lymphocytes | hsa-miR-17-5p | MIMAT0000070 | 18941111 |
| B-Lymphocytes | hsa-miR-17-5p | MIMAT0000070 | 19666108 |
| B-Lymphocytes | hsa-miR-181a-5p | MIMAT0000256 | 19692702 |
| B-Lymphocytes | hsa-miR-181a-5p | MIMAT0000256 | 20841506 |
| B-Lymphocytes | hsa-miR-181b-5p | MIMAT0000257 | 19692702 |
| B-Lymphocytes | hsa-miR-181b-5p | MIMAT0000257 | 17178851 |
| B-Lymphocytes | hsa-miR-196b-5p | MIMAT0001080 | 23293219 |
| B-Lymphocytes | hsa-miR-20a-5p | MIMAT0000075 | 19666108 |
| B-Lymphocytes | hsa-miR-20a-5p | MIMAT0000075 | 18941111 |
| B-Lymphocytes | hsa-miR-21-5p | MIMAT0000076 | 21317927 |
| B-Lymphocytes | hsa-miR-21-5p | MIMAT0000076 | 21078976 |
| B-Lymphocytes | hsa-miR-29a-3p | MIMAT0000086 | 20086245 |
| B-Lymphocytes | hsa-miR-29b-3p | MIMAT0000100 | 17178851 |
| B-Lymphocytes | hsa-miR-29b-3p | MIMAT0000100 | 20086245 |
| B-Lymphocytes | hsa-miR-29c-3p | MIMAT0000681 | 20086245 |
| B-Lymphocytes | hsa-miR-34a-5p | MIMAT0000255 | 21205967 |
| B-Lymphocytes | hsa-miR-34a-5p | MIMAT0000255 | 20598588 |
| B-Lymphocytes | hsa-miR-34b-3p | MIMAT0004676 | 21205967 |
| B-Lymphocytes | hsa-miR-34c-5p | MIMAT0000686 | 21205967 |
| B-Lymphocytes | hsa-miR-424-5p | MIMAT0001341 | 21062812 |
| B-Lymphocytes | hsa-miR-424-5p | MIMAT0001341 | 19692702 |
| B-Lymphocytes | hsa-miR-9-5p | MIMAT0000441 | 18583325 |
| B-Lymphocytes | mmu-miR-149-5p | MIMAT0000159 | 18762567 |
| B-Lymphocytes | mmu-miR-155-5p | MIMAT0000165 | 18450484 |
| B-Lymphocytes | mmu-miR-155-5p | MIMAT0000165 | 18455451 |
| B-Lymphocytes | mmu-miR-155-5p | MIMAT0000165 | 18055230 |
| B-Lymphocytes | mmu-miR-181b-5p | MIMAT0000673 | 18762567 |
| B-Lymphocytes | mmu-miR-19b-3p | MIMAT0000513 | 18762567 |
| B-Lymphocytes | mmu-miR-223-3p | MIMAT0000665 | 20935160 |
| B-Lymphocytes | mmu-miR-30b-5p | MIMAT0000130 | 18762567 |
| B-Lymphocytes | mmu-miR-34a-5p | MIMAT0000542 | 20598588 |
| Back | hsa-miR-101-3p | MIMAT0000099 | 19818710 |
| Back | hsa-miR-122-5p | MIMAT0000421 | 17179747 |
| Back | hsa-miR-199a-5p | MIMAT0000231 | 19818710 |
| Back | hsa-miR-214-3p | MIMAT0000271 | 19818710 |
| Back | hsa-miR-98-5p | MIMAT0000096 | 19818710 |
| Back | mmu-miR-122-5p | MIMAT0000246 | 17179747 |
| Back | mmu-miR-137-3p | MIMAT0000149 | 20368621 |
| Back | mmu-miR-214-3p | MIMAT0000661 | 19818710 |
| Basement Membrane | mmu-miR-200b-3p | MIMAT0000233 | 19787069 |
| Basement Membrane | mmu-miR-200c-3p | MIMAT0000657 | 19787069 |
| Bile | hsa-miR-122-5p | MIMAT0000421 | 20351063 |
| Bile | hsa-miR-15a-5p | MIMAT0000068 | 18949056 |
| Bile | hsa-miR-30a-5p | MIMAT0000087 | 19185580 |
| Bile | hsa-miR-34a-5p | MIMAT0000255 | 20185821 |
| Bile | hsa-miR-422a | MIMAT0001339 | 20351063 |
| Bile | mmu-miR-23b-3p | MIMAT0000125 | 19582816 |
| Bile | mmu-miR-24-3p | MIMAT0000219 | 19582816 |
| Bile | mmu-miR-27b-3p | MIMAT0000126 | 19582816 |
| Bile | mmu-miR-30a-5p | MIMAT0000128 | 19185580 |
| Bile | rno-miR-150-5p | MIMAT0000853 | 19892940 |
| Bile | rno-miR-194-5p | MIMAT0000869 | 19892940 |
| Bile Ducts | hsa-miR-15a-5p | MIMAT0000068 | 18949056 |
| Bile Ducts | mmu-miR-23b-3p | MIMAT0000125 | 19582816 |
| Bile Ducts | mmu-miR-24-3p | MIMAT0000219 | 19582816 |
| Bile Ducts | mmu-miR-27b-3p | MIMAT0000126 | 19582816 |
| Blastocyst | hsa-miR-19a-3p | MIMAT0000073 | 19296935 |
| Blastocyst | hsa-miR-24-3p | MIMAT0000080 | 19296935 |
| Blastocyst | mmu-miR-101a-3p | MIMAT0000133 | 17848513 |
| Blastocyst | mmu-miR-199a-3p | MIMAT0000230 | 17848513 |
| Blastocyst | mmu-miR-21a-5p | MIMAT0000530 | 18556655 |
| Blood | bta-miR-155 | MIMAT0009241 | 20735984 |
| Blood | cfa-miR-155 | MIMAT0006671 | 20735984 |
| Blood | dre-miR-155 | MIMAT0001851 | 20735984 |
| Blood | gga-miR-155 | MIMAT0001106 | 20735984 |
| Blood | hsa-let-7a-5p | MIMAT0000062 | 19939273 |
| Blood | hsa-let-7c-3p | MIMAT0026472 | 19939273 |
| Blood | hsa-let-7c-5p | MIMAT0000064 | 19939273 |
| Blood | hsa-let-7d-3p | MIMAT0004484 | 19939273 |
| Blood | hsa-let-7d-5p | MIMAT0000065 | 19939273 |
| Blood | hsa-let-7e-3p | MIMAT0004485 | 19939273 |
| Blood | hsa-let-7e-5p | MIMAT0000066 | 19939273 |
| Blood | hsa-let-7g-3p | MIMAT0004584 | 19939273 |
| Blood | hsa-let-7g-5p | MIMAT0000414 | 19939273 |
| Blood | hsa-let-7i-3p | MIMAT0004585 | 19939273 |
| Blood | hsa-let-7i-5p | MIMAT0000415 | 19939273 |
| Blood | hsa-miR-124-3p | MIMAT0000422 | 19944075 |
| Blood | hsa-miR-126-3p | MIMAT0000445 | 22867989 |
| Blood | hsa-miR-129-5p | MIMAT0000242 | 18189265 |
| Blood | hsa-miR-130b-3p | MIMAT0000691 | 18974142 |
| Blood | hsa-miR-135a-5p | MIMAT0000428 | 19944075 |
| Blood | hsa-miR-135b-5p | MIMAT0000758 | 19795981 |
| Blood | hsa-miR-146a-5p | MIMAT0000449 | 19333922 |
| Blood | hsa-miR-146a-5p | MIMAT0000449 | 20459811 |
| Blood | hsa-miR-146a-5p | MIMAT0000449 | 18759964 |
| Blood | hsa-miR-148a-3p | MIMAT0000243 | 19435428 |
| Blood | hsa-miR-155-5p | MIMAT0000646 | 20735984 |
| Blood | hsa-miR-155-5p | MIMAT0000646 | 18950466 |
| Blood | hsa-miR-155-5p | MIMAT0000646 | 17668390 |
| Blood | hsa-miR-15a-5p | MIMAT0000068 | 21205967 |
| Blood | hsa-miR-16-5p | MIMAT0000069 | 21885851 |
| Blood | hsa-miR-16-5p | MIMAT0000069 | 21205967 |
| Blood | hsa-miR-181a-5p | MIMAT0000256 | 20558617 |
| Blood | hsa-miR-181c-5p | MIMAT0000258 | 21112091 |
| Blood | hsa-miR-184 | MIMAT0000454 | 19286996 |
| Blood | hsa-miR-195-5p | MIMAT0000461 | 20952681 |
| Blood | hsa-miR-19b-3p | MIMAT0000074 | 19435428 |
| Blood | hsa-miR-20a-5p | MIMAT0000075 | 19435428 |
| Blood | hsa-miR-214-3p | MIMAT0000271 | 19435428 |
| Blood | hsa-miR-221-3p | MIMAT0000278 | 20505758 |
| Blood | hsa-miR-221-3p | MIMAT0000278 | 20516212 |
| Blood | hsa-miR-223-3p | MIMAT0000280 | 19278969 |
| Blood | hsa-miR-223-3p | MIMAT0000280 | 19017354 |
| Blood | hsa-miR-29a-3p | MIMAT0000086 | 19102781 |
| Blood | hsa-miR-29a-3p | MIMAT0000086 | 19951903 |
| Blood | hsa-miR-29b-3p | MIMAT0000100 | 19102781 |
| Blood | hsa-miR-31-3p | MIMAT0004504 | 19408243 |
| Blood | hsa-miR-31-5p | MIMAT0000089 | 19408243 |
| Blood | hsa-miR-320a | MIMAT0000510 | 18523662 |
| Blood | hsa-miR-34a-5p | MIMAT0000255 | 21205967 |
| Blood | hsa-miR-34b-3p | MIMAT0004676 | 21205967 |
| Blood | hsa-miR-34c-5p | MIMAT0000686 | 21205967 |
| Blood | hsa-miR-381-3p | MIMAT0000736 | 21435336 |
| Blood | hsa-miR-409-3p | MIMAT0001639 | 23360331 |
| Blood | hsa-miR-424-5p | MIMAT0001341 | 20972335 |
| Blood | hsa-miR-424-5p | MIMAT0001341 | 21885851 |
| Blood | hsa-miR-503-5p | MIMAT0002874 | 21220732 |
| Blood | hsa-miR-520h | MIMAT0002867 | 18189265 |
| Blood | hsa-miR-520h | MIMAT0002867 | 19435428 |
| Blood | hsa-miR-663a | MIMAT0003326 | 20622002 |
| Blood | hsa-miR-9-5p | MIMAT0000441 | 16831872 |
| Blood | hsa-miR-92a-3p | MIMAT0000092 | 19460962 |
| Blood | hsa-miR-92a-3p | MIMAT0000092 | 19435428 |
| Blood | hsa-miR-93-5p | MIMAT0000093 | 20956944 |
| Blood | hsa-miR-93-5p | MIMAT0000093 | 18974142 |
| Blood | mml-miR-155 | MIMAT0006216 | 20735984 |
| Blood | mmu-miR-100-3p | MIMAT0017051 | 21339483 |
| Blood | mmu-miR-100-5p | MIMAT0000655 | 21339483 |
| Blood | mmu-miR-125b-5p | MIMAT0000136 | 21118986 |
| Blood | mmu-miR-126a-3p | MIMAT0000138 | 18694565 |
| Blood | mmu-miR-223-3p | MIMAT0000665 | 22043014 |
| Blood | ppy-miR-155 | MIMAT0015777 | 20735984 |
| Blood | ptr-miR-155 | MIMAT0008048 | 20735984 |
| Blood | rno-let-7a-5p | MIMAT0000774 | 18258830 |
| Blood | rno-let-7b-3p | MIMAT0004705 | 18258830 |
| Blood | rno-let-7b-5p | MIMAT0000775 | 18258830 |
| Blood | rno-let-7c-5p | MIMAT0000776 | 18258830 |
| Blood | rno-let-7d-3p | MIMAT0000563 | 18258830 |
| Blood | rno-let-7d-5p | MIMAT0000562 | 18258830 |
| Blood | rno-let-7e-3p | MIMAT0004706 | 18258830 |
| Blood | rno-let-7e-5p | MIMAT0000777 | 18258830 |
| Blood | rno-let-7f-5p | MIMAT0000778 | 18258830 |
| Blood | rno-let-7i-3p | MIMAT0004707 | 18258830 |
| Blood | rno-let-7i-5p | MIMAT0000779 | 18258830 |
| Blood | rno-miR-100-5p | MIMAT0000822 | 18258830 |
| Blood | rno-miR-101a-3p | MIMAT0000823 | 18258830 |
| Blood | rno-miR-101b-3p | MIMAT0000615 | 18258830 |
| Blood | rno-miR-124-3p | MIMAT0000828 | 18258830 |
| Blood | rno-miR-125a-5p | MIMAT0000829 | 18258830 |
| Blood | rno-miR-129-5p | MIMAT0000600 | 18258830 |
| Blood | rno-miR-130a-3p | MIMAT0000836 | 18258830 |
| Blood | rno-miR-132-3p | MIMAT0000838 | 18258830 |
| Blood | rno-miR-134-5p | MIMAT0000840 | 18258830 |
| Blood | rno-miR-138-5p | MIMAT0000844 | 18258830 |
| Blood | rno-miR-139-5p | MIMAT0000845 | 18258830 |
| Blood | rno-miR-150-5p | MIMAT0000853 | 18258830 |
| Blood | rno-miR-181b-5p | MIMAT0000859 | 18258830 |
| Blood | rno-miR-185-5p | MIMAT0000862 | 18258830 |
| Blood | rno-miR-204-5p | MIMAT0000877 | 18258830 |
| Blood | rno-miR-21-5p | MIMAT0000790 | 18258830 |
| Blood | rno-miR-214-3p | MIMAT0000885 | 18258830 |
| Blood | rno-miR-215 | MIMAT0003118 | 18258830 |
| Blood | rno-miR-218a-5p | MIMAT0000888 | 18258830 |
| Blood | rno-miR-223-3p | MIMAT0000892 | 18258830 |
| Blood | rno-miR-23a-3p | MIMAT0000792 | 18258830 |
| Blood | rno-miR-23b-3p | MIMAT0000793 | 18258830 |
| Blood | rno-miR-24-3p | MIMAT0000794 | 18258830 |
| Blood | rno-miR-25-3p | MIMAT0000795 | 18258830 |
| Blood | rno-miR-26b-5p | MIMAT0000797 | 18258830 |
| Blood | rno-miR-27a-3p | MIMAT0000799 | 18258830 |
| Blood | rno-miR-290 | MIMAT0000893 | 18258830 |
| Blood | rno-miR-292-5p | MIMAT0000896 | 18258830 |
| Blood | rno-miR-293-5p | MIMAT0012847 | 18258830 |
| Blood | rno-miR-298-5p | MIMAT0000900 | 18258830 |
| Blood | rno-miR-29a-3p | MIMAT0000802 | 18258830 |
| Blood | rno-miR-29b-3p | MIMAT0000801 | 18258830 |
| Blood | rno-miR-29c-3p | MIMAT0000803 | 18258830 |
| Blood | rno-miR-301a-3p | MIMAT0000552 | 18258830 |
| Blood | rno-miR-30a-3p | MIMAT0000809 | 18258830 |
| Blood | rno-miR-30a-5p | MIMAT0000808 | 18258830 |
| Blood | rno-miR-30b-5p | MIMAT0000806 | 18258830 |
| Blood | rno-miR-30c-5p | MIMAT0000804 | 18258830 |
| Blood | rno-miR-30e-5p | MIMAT0000805 | 18258830 |
| Blood | rno-miR-320-3p | MIMAT0000903 | 18258830 |
| Blood | rno-miR-322-5p | MIMAT0001619 | 18258830 |
| Blood | rno-miR-324-5p | MIMAT0000553 | 18258830 |
| Blood | rno-miR-327 | MIMAT0000561 | 18258830 |
| Blood | rno-miR-328a-3p | MIMAT0000564 | 18258830 |
| Blood | rno-miR-331-3p | MIMAT0000570 | 18258830 |
| Blood | rno-miR-338-3p | MIMAT0000581 | 18258830 |
| Blood | rno-miR-342-3p | MIMAT0000589 | 18258830 |
| Blood | rno-miR-342-5p | MIMAT0004652 | 18258830 |
| Blood | rno-miR-34a-5p | MIMAT0000815 | 18258830 |
| Blood | rno-miR-374-5p | MIMAT0003208 | 18258830 |
| Blood | rno-miR-382-5p | MIMAT0003201 | 18258830 |
| Blood | rno-miR-383-5p | MIMAT0003114 | 18258830 |
| Blood | rno-miR-409a-3p | MIMAT0003205 | 18258830 |
| Blood | rno-miR-485-5p | MIMAT0003203 | 18258830 |
| Blood | rno-miR-494-3p | MIMAT0003193 | 18258830 |
| Blood | rno-miR-497-5p | MIMAT0003383 | 18258830 |
| Blood | rno-miR-543-5p | MIMAT0004787 | 18258830 |
| Blood | rno-miR-664-3p | MIMAT0003382 | 18258830 |
| Blood | rno-miR-7a-5p | MIMAT0000606 | 18258830 |
| Blood | rno-miR-92a-3p | MIMAT0000816 | 18258830 |
| Blood | rno-miR-98-5p | MIMAT0000819 | 18258830 |
| Blood | rno-miR-99a-5p | MIMAT0000820 | 18258830 |
| Blood | rno-miR-99b-5p | MIMAT0000821 | 18258830 |
| Blood | rno-miR-9a-5p | MIMAT0000781 | 18258830 |
| Blood | rno-miR-9a-5p | MIMAT0000781 | 16831872 |
| Blood | xtr-miR-155 | MIMAT0003608 | 20735984 |
| Blood Cells | hsa-miR-148a-3p | MIMAT0000243 | 19435428 |
| Blood Cells | hsa-miR-19b-3p | MIMAT0000074 | 19435428 |
| Blood Cells | hsa-miR-20a-5p | MIMAT0000075 | 19435428 |
| Blood Cells | hsa-miR-214-3p | MIMAT0000271 | 19435428 |
| Blood Cells | hsa-miR-520h | MIMAT0002867 | 19435428 |
| Blood Cells | hsa-miR-92a-3p | MIMAT0000092 | 19435428 |
| Blood Cells | mmu-miR-125b-5p | MIMAT0000136 | 21118986 |
| Blood Platelets | hsa-let-7a-5p | MIMAT0000062 | 19939273 |
| Blood Platelets | hsa-let-7a-5p | MIMAT0000062 | 20445018 |
| Blood Platelets | hsa-let-7c-3p | MIMAT0026472 | 19939273 |
| Blood Platelets | hsa-let-7c-5p | MIMAT0000064 | 20445018 |
| Blood Platelets | hsa-let-7c-5p | MIMAT0000064 | 19939273 |
| Blood Platelets | hsa-let-7d-3p | MIMAT0004484 | 19939273 |
| Blood Platelets | hsa-let-7d-5p | MIMAT0000065 | 20445018 |
| Blood Platelets | hsa-let-7d-5p | MIMAT0000065 | 21266476 |
| Blood Platelets | hsa-let-7d-5p | MIMAT0000065 | 19939273 |
| Blood Platelets | hsa-let-7e-3p | MIMAT0004485 | 19939273 |
| Blood Platelets | hsa-let-7e-5p | MIMAT0000066 | 19939273 |
| Blood Platelets | hsa-let-7e-5p | MIMAT0000066 | 20445018 |
| Blood Platelets | hsa-let-7f-5p | MIMAT0000067 | 20445018 |
| Blood Platelets | hsa-let-7g-3p | MIMAT0004584 | 19939273 |
| Blood Platelets | hsa-let-7g-5p | MIMAT0000414 | 19939273 |
| Blood Platelets | hsa-let-7i-3p | MIMAT0004585 | 19939273 |
| Blood Platelets | hsa-let-7i-5p | MIMAT0000415 | 19939273 |
| Blood Platelets | hsa-miR-10a-5p | MIMAT0000253 | 16549775 |
| Blood Platelets | hsa-miR-130a-3p | MIMAT0000425 | 16549775 |
| Blood Platelets | hsa-miR-146b-3p | MIMAT0004766 | 21266476 |
| Blood Platelets | hsa-miR-151a-5p | MIMAT0004697 | 20445018 |
| Blood Platelets | hsa-miR-28-5p | MIMAT0000085 | 20445018 |
| Blood Platelets | hsa-miR-520a-3p | MIMAT0002834 | 23389994 |
| Blood Platelets | hsa-miR-520b | MIMAT0002843 | 23389994 |
| Blood Platelets | hsa-miR-520e | MIMAT0002825 | 23389994 |
| Blood Platelets | hsa-miR-708-3p | MIMAT0004927 | 20445018 |
| Blood Platelets | hsa-miR-98-5p | MIMAT0000096 | 20445018 |
| Blood Vessels | hsa-miR-126-3p | MIMAT0000445 | 22867989 |
| Blood Vessels | hsa-miR-16-5p | MIMAT0000069 | 21885851 |
| Blood Vessels | hsa-miR-221-3p | MIMAT0000278 | 20516212 |
| Blood Vessels | hsa-miR-424-5p | MIMAT0001341 | 21885851 |
| Blood Vessels | hsa-miR-92a-3p | MIMAT0000092 | 19460962 |
| Blood Vessels | hsa-miR-93-5p | MIMAT0000093 | 20956944 |
| Blood Vessels | mmu-miR-100-3p | MIMAT0017051 | 21339483 |
| Blood Vessels | mmu-miR-100-5p | MIMAT0000655 | 21339483 |
| Blood Vessels | mmu-miR-126a-3p | MIMAT0000138 | 18694565 |
| Blood-Brain Barrier | mmu-miR-15a-5p | MIMAT0000526 | 20445066 |
| Bodily Secretions | hsa-let-7d-5p | MIMAT0000065 | 21616524 |
| Bodily Secretions | hsa-let-7f-5p | MIMAT0000067 | 21616524 |
| Bodily Secretions | hsa-let-7g-5p | MIMAT0000414 | 21616524 |
| Bodily Secretions | hsa-let-7i-5p | MIMAT0000415 | 21616524 |
| Bodily Secretions | hsa-miR-107 | MIMAT0000104 | 20489155 |
| Bodily Secretions | hsa-miR-124-3p | MIMAT0000422 | 19404929 |
| Bodily Secretions | hsa-miR-125a-5p | MIMAT0000443 | 19011087 |
| Bodily Secretions | hsa-miR-125b-5p | MIMAT0000423 | 19011087 |
| Bodily Secretions | hsa-miR-126-3p | MIMAT0000445 | 20083669 |
| Bodily Secretions | hsa-miR-146a-5p | MIMAT0000449 | 21236257 |
| Bodily Secretions | hsa-miR-146a-5p | MIMAT0000449 | 20181935 |
| Bodily Secretions | hsa-miR-15a-5p | MIMAT0000068 | 19144710 |
| Bodily Secretions | hsa-miR-16-5p | MIMAT0000069 | 19144710 |
| Bodily Secretions | hsa-miR-17-5p | MIMAT0000070 | 20406904 |
| Bodily Secretions | hsa-miR-181a-5p | MIMAT0000256 | 22956783 |
| Bodily Secretions | hsa-miR-184 | MIMAT0000454 | 19286996 |
| Bodily Secretions | hsa-miR-199a-5p | MIMAT0000231 | 19011087 |
| Bodily Secretions | hsa-miR-19a-3p | MIMAT0000073 | 22105995 |
| Bodily Secretions | hsa-miR-19b-3p | MIMAT0000074 | 22105995 |
| Bodily Secretions | hsa-miR-20a-5p | MIMAT0000075 | 20406904 |
| Bodily Secretions | hsa-miR-21-5p | MIMAT0000076 | 21469086 |
| Bodily Secretions | hsa-miR-214-3p | MIMAT0000271 | 22227154 |
| Bodily Secretions | hsa-miR-26a-5p | MIMAT0000082 | 19011087 |
| Bodily Secretions | hsa-miR-29a-3p | MIMAT0000086 | 21276447 |
| Bodily Secretions | hsa-miR-29a-3p | MIMAT0000086 | 21665270 |
| Bodily Secretions | hsa-miR-29b-3p | MIMAT0000100 | 21665270 |
| Bodily Secretions | hsa-miR-29b-3p | MIMAT0000100 | 20479936 |
| Bodily Secretions | hsa-miR-30a-5p | MIMAT0000087 | 23338554 |
| Bodily Secretions | hsa-miR-33a-5p | MIMAT0000091 | 23453925 |
| Bodily Secretions | hsa-miR-346 | MIMAT0000773 | 19011087 |
| Bodily Secretions | hsa-miR-375 | MIMAT0000728 | 15538371 |
| Bodily Secretions | hsa-miR-378a-3p | MIMAT0000732 | 19844573 |
| Bodily Secretions | hsa-miR-9-5p | MIMAT0000441 | 19008124 |
| Bodily Secretions | hsa-miR-9-5p | MIMAT0000441 | 19572217 |
| Bodily Secretions | hsa-miR-9-5p | MIMAT0000441 | 20479936 |
| Bodily Secretions | hsa-miR-98-5p | MIMAT0000096 | 21616524 |
| Bodily Secretions | mmu-miR-124-3p | MIMAT0000134 | 17462994 |
| Bodily Secretions | mmu-miR-133a-3p | MIMAT0000145 | 19043405 |
| Bodily Secretions | mmu-miR-206-3p | MIMAT0000239 | 19043405 |
| Bodily Secretions | mmu-miR-21a-5p | MIMAT0000530 | 19043405 |
| Bodily Secretions | mmu-miR-29a-3p | MIMAT0000535 | 21665270 |
| Bodily Secretions | mmu-miR-29b-3p | MIMAT0000127 | 21665270 |
| Bodily Secretions | mmu-miR-375-3p | MIMAT0000739 | 20224724 |
| Bodily Secretions | mmu-miR-375-3p | MIMAT0000739 | 15538371 |
| Bodily Secretions | mmu-miR-9-5p | MIMAT0000142 | 21288303 |
| Bodily Secretions | mmu-miR-93-5p | MIMAT0000540 | 20501654 |
| Bodily Secretions | rno-miR-150-5p | MIMAT0000853 | 19892940 |
| Bodily Secretions | rno-miR-194-5p | MIMAT0000869 | 19892940 |
| Bone and Bones | bta-miR-130a | MIMAT0009223 | 17855557 |
| Bone and Bones | bta-miR-335 | MIMAT0009291 | 18185580 |
| Bone and Bones | cfa-miR-130a | MIMAT0006631 | 17855557 |
| Bone and Bones | cfa-miR-335 | MIMAT0006624 | 18185580 |
| Bone and Bones | dre-miR-130a | MIMAT0001826 | 17855557 |
| Bone and Bones | hsa-miR-100-5p | MIMAT0000098 | 22684006 |
| Bone and Bones | hsa-miR-106b-5p | MIMAT0000680 | 18728182 |
| Bone and Bones | hsa-miR-125a-5p | MIMAT0000443 | 19011087 |
| Bone and Bones | hsa-miR-125b-5p | MIMAT0000423 | 19011087 |
| Bone and Bones | hsa-miR-125b-5p | MIMAT0000423 | 19738052 |
| Bone and Bones | hsa-miR-126-3p | MIMAT0000445 | 18474618 |
| Bone and Bones | hsa-miR-126-3p | MIMAT0000445 | 18832181 |
| Bone and Bones | hsa-miR-130a-3p | MIMAT0000425 | 17855557 |
| Bone and Bones | hsa-miR-133a-3p | MIMAT0000427 | 23069713 |
| Bone and Bones | hsa-miR-135b-5p | MIMAT0000758 | 19795981 |
| Bone and Bones | hsa-miR-140-5p | MIMAT0000431 | 21576357 |
| Bone and Bones | hsa-miR-141-3p | MIMAT0000432 | 19454767 |
| Bone and Bones | hsa-miR-142-3p | MIMAT0000434 | 21394831 |
| Bone and Bones | hsa-miR-145-5p | MIMAT0000437 | 23355420 |
| Bone and Bones | hsa-miR-145-5p | MIMAT0000437 | 18474618 |
| Bone and Bones | hsa-miR-146a-5p | MIMAT0000449 | 18174313 |
| Bone and Bones | hsa-miR-148a-3p | MIMAT0000243 | 19435428 |
| Bone and Bones | hsa-miR-155-5p | MIMAT0000646 | 18299402 |
| Bone and Bones | hsa-miR-155-5p | MIMAT0000646 | 20427544 |
| Bone and Bones | hsa-miR-155-5p | MIMAT0000646 | 20133617 |
| Bone and Bones | hsa-miR-16-5p | MIMAT0000069 | 19738602 |
| Bone and Bones | hsa-miR-17-5p | MIMAT0000070 | 19390056 |
| Bone and Bones | hsa-miR-181a-5p | MIMAT0000256 | 22956783 |
| Bone and Bones | hsa-miR-181a-5p | MIMAT0000256 | 18728182 |
| Bone and Bones | hsa-miR-181b-5p | MIMAT0000257 | 18728182 |
| Bone and Bones | hsa-miR-196a-5p | MIMAT0000226 | 20480203 |
| Bone and Bones | hsa-miR-199a-5p | MIMAT0000231 | 22441842 |
| Bone and Bones | hsa-miR-199a-5p | MIMAT0000231 | 19011087 |
| Bone and Bones | hsa-miR-19a-3p | MIMAT0000073 | 18728182 |
| Bone and Bones | hsa-miR-19a-3p | MIMAT0000073 | 19390056 |
| Bone and Bones | hsa-miR-19b-3p | MIMAT0000074 | 19435428 |
| Bone and Bones | hsa-miR-19b-3p | MIMAT0000074 | 19390056 |
| Bone and Bones | hsa-miR-19b-3p | MIMAT0000074 | 18728182 |
| Bone and Bones | hsa-miR-200a-3p | MIMAT0000682 | 19454767 |
| Bone and Bones | hsa-miR-206 | MIMAT0000462 | 17855557 |
| Bone and Bones | hsa-miR-20a-5p | MIMAT0000075 | 19435428 |
| Bone and Bones | hsa-miR-20a-5p | MIMAT0000075 | 19390056 |
| Bone and Bones | hsa-miR-21-5p | MIMAT0000076 | 19578724 |
| Bone and Bones | hsa-miR-214-3p | MIMAT0000271 | 19435428 |
| Bone and Bones | hsa-miR-24-3p | MIMAT0000080 | 20019669 |
| Bone and Bones | hsa-miR-25-3p | MIMAT0000081 | 18728182 |
| Bone and Bones | hsa-miR-26a-5p | MIMAT0000082 | 18197755 |
| Bone and Bones | hsa-miR-26a-5p | MIMAT0000082 | 19011087 |
| Bone and Bones | hsa-miR-27a-3p | MIMAT0000084 | 19440384 |
| Bone and Bones | hsa-miR-302a-3p | MIMAT0000684 | 17855557 |
| Bone and Bones | hsa-miR-30a-5p | MIMAT0000087 | 23287430 |
| Bone and Bones | hsa-miR-30c-5p | MIMAT0000244 | 23469762 |
| Bone and Bones | hsa-miR-32-5p | MIMAT0000090 | 18728182 |
| Bone and Bones | hsa-miR-320a | MIMAT0000510 | 17855557 |
| Bone and Bones | hsa-miR-335-5p | MIMAT0000765 | 18185580 |
| Bone and Bones | hsa-miR-346 | MIMAT0000773 | 19011087 |
| Bone and Bones | hsa-miR-34a-5p | MIMAT0000255 | 20598588 |
| Bone and Bones | hsa-miR-34b-3p | MIMAT0004676 | 22498974 |
| Bone and Bones | hsa-miR-34c-5p | MIMAT0000686 | 22498974 |
| Bone and Bones | hsa-miR-378a-3p | MIMAT0000732 | 19844573 |
| Bone and Bones | hsa-miR-449a | MIMAT0001541 | 21569010 |
| Bone and Bones | hsa-miR-489-3p | MIMAT0002805 | 19440384 |
| Bone and Bones | hsa-miR-520h | MIMAT0002867 | 19435428 |
| Bone and Bones | hsa-miR-637 | MIMAT0003307 | 21880893 |
| Bone and Bones | hsa-miR-9-5p | MIMAT0000441 | 19008124 |
| Bone and Bones | hsa-miR-92a-3p | MIMAT0000092 | 19435428 |
| Bone and Bones | hsa-miR-92a-3p | MIMAT0000092 | 18728182 |
| Bone and Bones | hsa-miR-92a-3p | MIMAT0000092 | 19390056 |
| Bone and Bones | hsa-miR-93-5p | MIMAT0000093 | 18728182 |
| Bone and Bones | mmu-let-7a-5p | MIMAT0000521 | 18474618 |
| Bone and Bones | mmu-miR-122-5p | MIMAT0000246 | 16258535 |
| Bone and Bones | mmu-miR-122-5p | MIMAT0000246 | 21364282 |
| Bone and Bones | mmu-miR-126a-3p | MIMAT0000138 | 18474618 |
| Bone and Bones | mmu-miR-133a-3p | MIMAT0000145 | 18784367 |
| Bone and Bones | mmu-miR-135a-5p | MIMAT0000147 | 18784367 |
| Bone and Bones | mmu-miR-140-5p | MIMAT0000151 | 16828749 |
| Bone and Bones | mmu-miR-140-5p | MIMAT0000151 | 21576357 |
| Bone and Bones | mmu-miR-141-3p | MIMAT0000153 | 19454767 |
| Bone and Bones | mmu-miR-145a-5p | MIMAT0000157 | 18474618 |
| Bone and Bones | mmu-miR-199a-3p | MIMAT0000230 | 19251704 |
| Bone and Bones | mmu-miR-200a-3p | MIMAT0000519 | 19454767 |
| Bone and Bones | mmu-miR-204-5p | MIMAT0000237 | 20039258 |
| Bone and Bones | mmu-miR-206-3p | MIMAT0000239 | 19933329 |
| Bone and Bones | mmu-miR-211-5p | MIMAT0000668 | 20039258 |
| Bone and Bones | mmu-miR-21a-5p | MIMAT0000530 | 21273303 |
| Bone and Bones | mmu-miR-23b-3p | MIMAT0000125 | 19582816 |
| Bone and Bones | mmu-miR-24-3p | MIMAT0000219 | 19582816 |
| Bone and Bones | mmu-miR-27b-3p | MIMAT0000126 | 19342382 |
| Bone and Bones | mmu-miR-27b-3p | MIMAT0000126 | 19582816 |
| Bone and Bones | mmu-miR-2861 | MIMAT0013803 | 19920351 |
| Bone and Bones | mmu-miR-29b-3p | MIMAT0000127 | 19342382 |
| Bone and Bones | mmu-miR-34a-5p | MIMAT0000542 | 20424141 |
| Bone and Bones | mmu-miR-34a-5p | MIMAT0000542 | 20598588 |
| Bone and Bones | mmu-miR-34c-5p | MIMAT0000381 | 18784367 |
| Bone and Bones | mmu-miR-370-3p | MIMAT0001095 | 22587915 |
| Bone and Bones | mmu-miR-3960 | MIMAT0019336 | 21324897 |
| Bone and Bones | mmu-miR-9-5p | MIMAT0000142 | 22465325 |
| Bone and Bones | ppy-miR-130a | MIMAT0015753 | 17855557 |
| Bone and Bones | ppy-miR-335 | MIMAT0015837 | 18185580 |
| Bone and Bones | ptr-miR-130a | MIMAT0008025 | 17855557 |
| Bone and Bones | ptr-miR-335 | MIMAT0008104 | 18185580 |
| Bone and Bones | rno-miR-335 | MIMAT0000575 | 18185580 |
| Bone and Bones | ssc-miR-130a | MIMAT0007758 | 17855557 |
| Bone and Bones | ssc-miR-335 | MIMAT0013955 | 18185580 |
| Bone and Bones | xtr-miR-130a | MIMAT0003591 | 17855557 |
| Bone Marrow | hsa-miR-125a-5p | MIMAT0000443 | 19011087 |
| Bone Marrow | hsa-miR-125b-5p | MIMAT0000423 | 19011087 |
| Bone Marrow | hsa-miR-126-3p | MIMAT0000445 | 18474618 |
| Bone Marrow | hsa-miR-145-5p | MIMAT0000437 | 18474618 |
| Bone Marrow | hsa-miR-155-5p | MIMAT0000646 | 18299402 |
| Bone Marrow | hsa-miR-199a-5p | MIMAT0000231 | 19011087 |
| Bone Marrow | hsa-miR-203a | MIMAT0000264 | 21707582 |
| Bone Marrow | hsa-miR-26a-5p | MIMAT0000082 | 19011087 |
| Bone Marrow | hsa-miR-346 | MIMAT0000773 | 19011087 |
| Bone Marrow | hsa-miR-637 | MIMAT0003307 | 21880893 |
| Bone Marrow | mmu-let-7a-5p | MIMAT0000521 | 18474618 |
| Bone Marrow | mmu-miR-126a-3p | MIMAT0000138 | 18474618 |
| Bone Marrow | mmu-miR-145a-5p | MIMAT0000157 | 18474618 |
| Bone Marrow | mmu-miR-9-5p | MIMAT0000142 | 22465325 |
| Bone Marrow Cells | hsa-miR-126-3p | MIMAT0000445 | 18474618 |
| Bone Marrow Cells | hsa-miR-145-5p | MIMAT0000437 | 18474618 |
| Bone Marrow Cells | mmu-let-7a-5p | MIMAT0000521 | 18474618 |
| Bone Marrow Cells | mmu-miR-126a-3p | MIMAT0000138 | 18474618 |
| Bone Marrow Cells | mmu-miR-145a-5p | MIMAT0000157 | 18474618 |
| Brain | hsa-let-7a-5p | MIMAT0000062 | 20668208 |
| Brain | hsa-let-7a-5p | MIMAT0000062 | 19110058 |
| Brain | hsa-let-7b-5p | MIMAT0000063 | 20133835 |
| Brain | hsa-let-7d-3p | MIMAT0004484 | 19703567 |
| Brain | hsa-let-7d-5p | MIMAT0000065 | 21266476 |
| Brain | hsa-let-7d-5p | MIMAT0000065 | 19703567 |
| Brain | hsa-let-7d-5p | MIMAT0000065 | 19110058 |
| Brain | hsa-miR-1 | MIMAT0000416 | 15685193 |
| Brain | hsa-miR-106a-5p | MIMAT0000103 | 19110058 |
| Brain | hsa-miR-106b-5p | MIMAT0000680 | 19110058 |
| Brain | hsa-miR-107 | MIMAT0000104 | 18234899 |
| Brain | hsa-miR-107 | MIMAT0000104 | 20489155 |
| Brain | hsa-miR-10a-5p | MIMAT0000253 | 20506192 |
| Brain | hsa-miR-124-3p | MIMAT0000422 | 20362537 |
| Brain | hsa-miR-124-3p | MIMAT0000422 | 18434550 |
| Brain | hsa-miR-124-3p | MIMAT0000422 | 18577219 |
| Brain | hsa-miR-124-3p | MIMAT0000422 | 21196113 |
| Brain | hsa-miR-124-3p | MIMAT0000422 | 18607543 |
| Brain | hsa-miR-124-3p | MIMAT0000422 | 19703567 |
| Brain | hsa-miR-124-3p | MIMAT0000422 | 15685193 |
| Brain | hsa-miR-124-3p | MIMAT0000422 | 19131573 |
| Brain | hsa-miR-1258 | MIMAT0005909 | 21266359 |
| Brain | hsa-miR-125a-5p | MIMAT0000443 | 18973228 |
| Brain | hsa-miR-125b-5p | MIMAT0000423 | 20347935 |
| Brain | hsa-miR-125b-5p | MIMAT0000423 | 19293287 |
| Brain | hsa-miR-125b-5p | MIMAT0000423 | 20159450 |
| Brain | hsa-miR-128-3p | MIMAT0000424 | 18810376 |
| Brain | hsa-miR-128-3p | MIMAT0000424 | 19010882 |
| Brain | hsa-miR-128-3p | MIMAT0000424 | 19941032 |
| Brain | hsa-miR-128-3p | MIMAT0000424 | 21143953 |
| Brain | hsa-miR-130a-3p | MIMAT0000425 | 19110058 |
| Brain | hsa-miR-132-3p | MIMAT0000426 | 20010955 |
| Brain | hsa-miR-132-3p | MIMAT0000426 | 18082412 |
| Brain | hsa-miR-137 | MIMAT0000429 | 23252729 |
| Brain | hsa-miR-137 | MIMAT0000429 | 18577219 |
| Brain | hsa-miR-146a-5p | MIMAT0000449 | 20181935 |
| Brain | hsa-miR-146a-5p | MIMAT0000449 | 18801740 |
| Brain | hsa-miR-146a-5p | MIMAT0000449 | 19540598 |
| Brain | hsa-miR-146b-3p | MIMAT0004766 | 21266476 |
| Brain | hsa-miR-151a-3p | MIMAT0000757 | 21143953 |
| Brain | hsa-miR-153-3p | MIMAT0000439 | 19676043 |
| Brain | hsa-miR-155-5p | MIMAT0000646 | 19897480 |
| Brain | hsa-miR-15a-5p | MIMAT0000068 | 19110058 |
| Brain | hsa-miR-15a-5p | MIMAT0000068 | 18434550 |
| Brain | hsa-miR-15b-5p | MIMAT0000417 | 19135980 |
| Brain | hsa-miR-16-1-3p | MIMAT0004489 | 23175429 |
| Brain | hsa-miR-17-5p | MIMAT0000070 | 19110058 |
| Brain | hsa-miR-182-5p | MIMAT0000259 | 17597072 |
| Brain | hsa-miR-183-5p | MIMAT0000261 | 19711202 |
| Brain | hsa-miR-185-5p | MIMAT0000455 | 21143953 |
| Brain | hsa-miR-18a-5p | MIMAT0000072 | 19131573 |
| Brain | hsa-miR-195-5p | MIMAT0000461 | 22217655 |
| Brain | hsa-miR-199b-5p | MIMAT0000263 | 19308264 |
| Brain | hsa-miR-19b-3p | MIMAT0000074 | 18434550 |
| Brain | hsa-miR-200a-3p | MIMAT0000682 | 19703993 |
| Brain | hsa-miR-200b-3p | MIMAT0000318 | 17923093 |
| Brain | hsa-miR-205-5p | MIMAT0000266 | 23125283 |
| Brain | hsa-miR-20a-5p | MIMAT0000075 | 19110058 |
| Brain | hsa-miR-21-5p | MIMAT0000076 | 18372920 |
| Brain | hsa-miR-21-5p | MIMAT0000076 | 21170291 |
| Brain | hsa-miR-219a-5p | MIMAT0000276 | 19196972 |
| Brain | hsa-miR-221-3p | MIMAT0000278 | 18759060 |
| Brain | hsa-miR-221-3p | MIMAT0000278 | 17721077 |
| Brain | hsa-miR-222-3p | MIMAT0000279 | 17721077 |
| Brain | hsa-miR-24-1-5p | MIMAT0000079 | 16224024 |
| Brain | hsa-miR-26a-5p | MIMAT0000082 | 19487573 |
| Brain | hsa-miR-26a-5p | MIMAT0000082 | 20080666 |
| Brain | hsa-miR-296-5p | MIMAT0000690 | 18977327 |
| Brain | hsa-miR-29a-3p | MIMAT0000086 | 19584290 |
| Brain | hsa-miR-29a-3p | MIMAT0000086 | 20202123 |
| Brain | hsa-miR-29a-3p | MIMAT0000086 | 18434550 |
| Brain | hsa-miR-29b-3p | MIMAT0000100 | 18434550 |
| Brain | hsa-miR-29c-3p | MIMAT0000681 | 21565331 |
| Brain | hsa-miR-320a | MIMAT0000510 | 20628061 |
| Brain | hsa-miR-326 | MIMAT0000756 | 19955368 |
| Brain | hsa-miR-326 | MIMAT0000756 | 20667897 |
| Brain | hsa-miR-34a-5p | MIMAT0000255 | 20470934 |
| Brain | hsa-miR-34a-5p | MIMAT0000255 | 19773441 |
| Brain | hsa-miR-373-3p | MIMAT0000726 | 15685193 |
| Brain | hsa-miR-383-5p | MIMAT0000738 | 23227829 |
| Brain | hsa-miR-383-5p | MIMAT0000738 | 23564324 |
| Brain | hsa-miR-429 | MIMAT0001536 | 17923093 |
| Brain | hsa-miR-433-3p | MIMAT0001627 | 18252210 |
| Brain | hsa-miR-483-5p | MIMAT0004761 | 22465663 |
| Brain | hsa-miR-509-3p | MIMAT0002881 | 21143953 |
| Brain | hsa-miR-7-5p | MIMAT0000252 | 18483236 |
| Brain | hsa-miR-7-5p | MIMAT0000252 | 19628698 |
| Brain | hsa-miR-758-3p | MIMAT0003879 | 21885853 |
| Brain | hsa-miR-802 | MIMAT0004185 | 19897480 |
| Brain | hsa-miR-9-3p | MIMAT0000442 | 19118166 |
| Brain | hsa-miR-9-5p | MIMAT0000441 | 19330006 |
| Brain | hsa-miR-9-5p | MIMAT0000441 | 18434550 |
| Brain | hsa-miR-9-5p | MIMAT0000441 | 19118166 |
| Brain | hsa-miR-9-5p | MIMAT0000441 | 18973228 |
| Brain | hsa-miR-9-5p | MIMAT0000441 | 20362537 |
| Brain | hsa-miR-96-5p | MIMAT0000095 | 17597072 |
| Brain | mmu-let-7b-5p | MIMAT0000522 | 19536157 |
| Brain | mmu-let-7b-5p | MIMAT0000522 | 20133835 |
| Brain | mmu-let-7d-5p | MIMAT0000383 | 19703567 |
| Brain | mmu-miR-124-3p | MIMAT0000134 | 18577219 |
| Brain | mmu-miR-124-3p | MIMAT0000134 | 19287386 |
| Brain | mmu-miR-124-3p | MIMAT0000134 | 19703567 |
| Brain | mmu-miR-134-5p | MIMAT0000146 | 20622856 |
| Brain | mmu-miR-134-5p | MIMAT0000146 | 20126250 |
| Brain | mmu-miR-136-5p | MIMAT0000148 | 19536157 |
| Brain | mmu-miR-137-3p | MIMAT0000149 | 18577219 |
| Brain | mmu-miR-137-5p | MIMAT0016986 | 18577219 |
| Brain | mmu-miR-146a-5p | MIMAT0000158 | 21730286 |
| Brain | mmu-miR-149-5p | MIMAT0000159 | 19536157 |
| Brain | mmu-miR-155-5p | MIMAT0000165 | 21247879 |
| Brain | mmu-miR-155-5p | MIMAT0000165 | 22043967 |
| Brain | mmu-miR-15a-5p | MIMAT0000526 | 19536157 |
| Brain | mmu-miR-17-5p | MIMAT0000649 | 19536157 |
| Brain | mmu-miR-181a-5p | MIMAT0000210 | 19536157 |
| Brain | mmu-miR-190a-5p | MIMAT0000220 | 19536157 |
| Brain | mmu-miR-19b-3p | MIMAT0000513 | 19536157 |
| Brain | mmu-miR-1a-3p | MIMAT0000123 | 17234972 |
| Brain | mmu-miR-205-5p | MIMAT0000238 | 23125283 |
| Brain | mmu-miR-219a-5p | MIMAT0000664 | 19196972 |
| Brain | mmu-miR-21a-5p | MIMAT0000530 | 18372920 |
| Brain | mmu-miR-223-3p | MIMAT0000665 | 19536157 |
| Brain | mmu-miR-23a-3p | MIMAT0000532 | 19259393 |
| Brain | mmu-miR-23b-3p | MIMAT0000125 | 18716031 |
| Brain | mmu-miR-23b-3p | MIMAT0000125 | 19259393 |
| Brain | mmu-miR-24-3p | MIMAT0000219 | 19536157 |
| Brain | mmu-miR-26a-5p | MIMAT0000533 | 19536157 |
| Brain | mmu-miR-297a-5p | MIMAT0000375 | 19536157 |
| Brain | mmu-miR-298-5p | MIMAT0000376 | 18986979 |
| Brain | mmu-miR-298-5p | MIMAT0000376 | 21247879 |
| Brain | mmu-miR-301b-3p | MIMAT0004186 | 19536157 |
| Brain | mmu-miR-30a-5p | MIMAT0000128 | 20921386 |
| Brain | mmu-miR-30d-5p | MIMAT0000515 | 20921386 |
| Brain | mmu-miR-30e-5p | MIMAT0000248 | 19536157 |
| Brain | mmu-miR-324-3p | MIMAT0000556 | 19536157 |
| Brain | mmu-miR-328-3p | MIMAT0000565 | 18986979 |
| Brain | mmu-miR-340-5p | MIMAT0004651 | 19536157 |
| Brain | mmu-miR-346-5p | MIMAT0000597 | 19780716 |
| Brain | mmu-miR-34b-5p | MIMAT0000382 | 19536157 |
| Brain | mmu-miR-351-5p | MIMAT0000609 | 21247879 |
| Brain | mmu-miR-362-5p | MIMAT0000706 | 19536157 |
| Brain | mmu-miR-381-3p | MIMAT0000746 | 20921386 |
| Brain | mmu-miR-425-5p | MIMAT0004750 | 19536157 |
| Brain | mmu-miR-449a-5p | MIMAT0001542 | 19056356 |
| Brain | mmu-miR-451a | MIMAT0001632 | 19536157 |
| Brain | mmu-miR-495-3p | MIMAT0003456 | 20921386 |
| Brain | mmu-miR-497-5p | MIMAT0003453 | 20053374 |
| Brain | mmu-miR-541-5p | MIMAT0003170 | 19536157 |
| Brain | mmu-miR-743a-3p | MIMAT0004238 | 21623795 |
| Brain | mmu-miR-758-3p | MIMAT0003889 | 19536157 |
| Brain | mmu-miR-7b-5p | MIMAT0000678 | 19536157 |
| Brain | mmu-miR-7b-5p | MIMAT0000678 | 17028171 |
| Brain | mmu-miR-9-5p | MIMAT0000142 | 19536157 |
| Brain | mmu-miR-9-5p | MIMAT0000142 | 20362537 |
| Brain | mmu-miR-9-5p | MIMAT0000142 | 18842901 |
| Brain | rno-let-7a-5p | MIMAT0000774 | 18258830 |
| Brain | rno-let-7b-3p | MIMAT0004705 | 18258830 |
| Brain | rno-let-7b-5p | MIMAT0000775 | 18258830 |
| Brain | rno-let-7c-5p | MIMAT0000776 | 18258830 |
| Brain | rno-let-7d-3p | MIMAT0000563 | 18258830 |
| Brain | rno-let-7d-5p | MIMAT0000562 | 19703567 |
| Brain | rno-let-7d-5p | MIMAT0000562 | 18258830 |
| Brain | rno-let-7d-5p | MIMAT0000562 | 20557304 |
| Brain | rno-let-7e-3p | MIMAT0004706 | 18258830 |
| Brain | rno-let-7e-5p | MIMAT0000777 | 18258830 |
| Brain | rno-let-7f-5p | MIMAT0000778 | 18258830 |
| Brain | rno-let-7i-3p | MIMAT0004707 | 18258830 |
| Brain | rno-let-7i-5p | MIMAT0000779 | 18258830 |
| Brain | rno-miR-100-5p | MIMAT0000822 | 18258830 |
| Brain | rno-miR-101a-3p | MIMAT0000823 | 18258830 |
| Brain | rno-miR-101b-3p | MIMAT0000615 | 18258830 |
| Brain | rno-miR-124-3p | MIMAT0000828 | 19703567 |
| Brain | rno-miR-124-3p | MIMAT0000828 | 19131573 |
| Brain | rno-miR-124-3p | MIMAT0000828 | 18258830 |
| Brain | rno-miR-125a-5p | MIMAT0000829 | 18258830 |
| Brain | rno-miR-129-5p | MIMAT0000600 | 18258830 |
| Brain | rno-miR-130a-3p | MIMAT0000836 | 18258830 |
| Brain | rno-miR-132-3p | MIMAT0000838 | 18258830 |
| Brain | rno-miR-134-5p | MIMAT0000840 | 16421561 |
| Brain | rno-miR-134-5p | MIMAT0000840 | 18258830 |
| Brain | rno-miR-135b-5p | MIMAT0000611 | 18667155 |
| Brain | rno-miR-138-5p | MIMAT0000844 | 18258830 |
| Brain | rno-miR-139-5p | MIMAT0000845 | 18258830 |
| Brain | rno-miR-145-5p | MIMAT0000851 | 19142192 |
| Brain | rno-miR-150-5p | MIMAT0000853 | 18258830 |
| Brain | rno-miR-181a-5p | MIMAT0000858 | 22144581 |
| Brain | rno-miR-181b-5p | MIMAT0000859 | 18258830 |
| Brain | rno-miR-183-5p | MIMAT0000860 | 19711202 |
| Brain | rno-miR-185-5p | MIMAT0000862 | 18258830 |
| Brain | rno-miR-18a-5p | MIMAT0000787 | 19131573 |
| Brain | rno-miR-204-5p | MIMAT0000877 | 18258830 |
| Brain | rno-miR-21-5p | MIMAT0000790 | 21154462 |
| Brain | rno-miR-21-5p | MIMAT0000790 | 18258830 |
| Brain | rno-miR-214-3p | MIMAT0000885 | 18258830 |
| Brain | rno-miR-215 | MIMAT0003118 | 18258830 |
| Brain | rno-miR-218a-5p | MIMAT0000888 | 18258830 |
| Brain | rno-miR-223-3p | MIMAT0000892 | 18258830 |
| Brain | rno-miR-23a-3p | MIMAT0000792 | 18258830 |
| Brain | rno-miR-23b-3p | MIMAT0000793 | 18258830 |
| Brain | rno-miR-24-3p | MIMAT0000794 | 18258830 |
| Brain | rno-miR-25-3p | MIMAT0000795 | 18258830 |
| Brain | rno-miR-26b-5p | MIMAT0000797 | 18258830 |
| Brain | rno-miR-27a-3p | MIMAT0000799 | 18258830 |
| Brain | rno-miR-290 | MIMAT0000893 | 18258830 |
| Brain | rno-miR-292-5p | MIMAT0000896 | 18258830 |
| Brain | rno-miR-293-5p | MIMAT0012847 | 18258830 |
| Brain | rno-miR-298-5p | MIMAT0000900 | 18258830 |
| Brain | rno-miR-29a-3p | MIMAT0000802 | 18258830 |
| Brain | rno-miR-29b-3p | MIMAT0000801 | 18258830 |
| Brain | rno-miR-29c-3p | MIMAT0000803 | 18258830 |
| Brain | rno-miR-301a-3p | MIMAT0000552 | 18258830 |
| Brain | rno-miR-30a-3p | MIMAT0000809 | 18258830 |
| Brain | rno-miR-30a-5p | MIMAT0000808 | 18258830 |
| Brain | rno-miR-30b-5p | MIMAT0000806 | 18258830 |
| Brain | rno-miR-30c-5p | MIMAT0000804 | 18258830 |
| Brain | rno-miR-30e-5p | MIMAT0000805 | 18258830 |
| Brain | rno-miR-320-3p | MIMAT0000903 | 18258830 |
| Brain | rno-miR-322-5p | MIMAT0001619 | 18258830 |
| Brain | rno-miR-324-5p | MIMAT0000553 | 18258830 |
| Brain | rno-miR-327 | MIMAT0000561 | 18258830 |
| Brain | rno-miR-328a-3p | MIMAT0000564 | 18258830 |
| Brain | rno-miR-331-3p | MIMAT0000570 | 18258830 |
| Brain | rno-miR-338-3p | MIMAT0000581 | 18258830 |
| Brain | rno-miR-342-3p | MIMAT0000589 | 18258830 |
| Brain | rno-miR-342-5p | MIMAT0004652 | 18258830 |
| Brain | rno-miR-34a-5p | MIMAT0000815 | 18258830 |
| Brain | rno-miR-374-5p | MIMAT0003208 | 18258830 |
| Brain | rno-miR-382-5p | MIMAT0003201 | 18258830 |
| Brain | rno-miR-383-5p | MIMAT0003114 | 18258830 |
| Brain | rno-miR-409a-3p | MIMAT0003205 | 18258830 |
| Brain | rno-miR-485-5p | MIMAT0003203 | 18258830 |
| Brain | rno-miR-494-3p | MIMAT0003193 | 18258830 |
| Brain | rno-miR-497-5p | MIMAT0003383 | 18258830 |
| Brain | rno-miR-543-5p | MIMAT0004787 | 18258830 |
| Brain | rno-miR-664-3p | MIMAT0003382 | 18258830 |
| Brain | rno-miR-7a-5p | MIMAT0000606 | 18258830 |
| Brain | rno-miR-92a-3p | MIMAT0000816 | 18258830 |
| Brain | rno-miR-98-5p | MIMAT0000819 | 18258830 |
| Brain | rno-miR-99a-5p | MIMAT0000820 | 18258830 |
| Brain | rno-miR-99b-5p | MIMAT0000821 | 18258830 |
| Brain | rno-miR-9a-5p | MIMAT0000781 | 18667155 |
| Brain | rno-miR-9a-5p | MIMAT0000781 | 18258830 |
| Breast | bta-miR-335 | MIMAT0009291 | 18185580 |
| Breast | cfa-miR-27a | MIMAT0006641 | 18006846 |
| Breast | cfa-miR-335 | MIMAT0006624 | 18185580 |
| Breast | dre-miR-27a | MIMAT0001796 | 18006846 |
| Breast | hsa-let-7a-5p | MIMAT0000062 | 18083101 |
| Breast | hsa-let-7a-5p | MIMAT0000062 | 18758960 |
| Breast | hsa-let-7a-5p | MIMAT0000062 | 19878981 |
| Breast | hsa-let-7f-5p | MIMAT0000067 | 22407818 |
| Breast | hsa-miR-103a-3p | MIMAT0000101 | 20603000 |
| Breast | hsa-miR-106a-5p | MIMAT0000103 | 16461460 |
| Breast | hsa-miR-107 | MIMAT0000104 | 20603000 |
| Breast | hsa-miR-10b-5p | MIMAT0000254 | 17898713 |
| Breast | hsa-miR-10b-5p | MIMAT0000254 | 22573479 |
| Breast | hsa-miR-1226-3p | MIMAT0005577 | 20514397 |
| Breast | hsa-miR-1258 | MIMAT0005909 | 21266359 |
| Breast | hsa-miR-125a-5p | MIMAT0000443 | 19875930 |
| Breast | hsa-miR-125a-5p | MIMAT0000443 | 21220473 |
| Breast | hsa-miR-125b-5p | MIMAT0000423 | 19875930 |
| Breast | hsa-miR-125b-5p | MIMAT0000423 | 19570947 |
| Breast | hsa-miR-125b-5p | MIMAT0000423 | 20729973 |
| Breast | hsa-miR-125b-5p | MIMAT0000423 | 19738052 |
| Breast | hsa-miR-128-3p | MIMAT0000424 | 20054641 |
| Breast | hsa-miR-141-3p | MIMAT0000432 | 18483486 |
| Breast | hsa-miR-145-5p | MIMAT0000437 | 21092188 |
| Breast | hsa-miR-145-5p | MIMAT0000437 | 19360360 |
| Breast | hsa-miR-145-5p | MIMAT0000437 | 20668064 |
| Breast | hsa-miR-145-5p | MIMAT0000437 | 19996288 |
| Breast | hsa-miR-146a-5p | MIMAT0000449 | 18660546 |
| Breast | hsa-miR-146a-5p | MIMAT0000449 | 18504431 |
| Breast | hsa-miR-146b-5p | MIMAT0002809 | 18504431 |
| Breast | hsa-miR-150-5p | MIMAT0000451 | 18667440 |
| Breast | hsa-miR-153-3p | MIMAT0000439 | 20668064 |
| Breast | hsa-miR-154-5p | MIMAT0000452 | 20603000 |
| Breast | hsa-miR-155-5p | MIMAT0000646 | 20354188 |
| Breast | hsa-miR-155-5p | MIMAT0000646 | 20371610 |
| Breast | hsa-miR-155-5p | MIMAT0000646 | 18794355 |
| Breast | hsa-miR-155-5p | MIMAT0000646 | 20427544 |
| Breast | hsa-miR-16-5p | MIMAT0000069 | 20668064 |
| Breast | hsa-miR-17-5p | MIMAT0000070 | 18695042 |
| Breast | hsa-miR-17-5p | MIMAT0000070 | 16940181 |
| Breast | hsa-miR-17-5p | MIMAT0000070 | 20406904 |
| Breast | hsa-miR-181b-5p | MIMAT0000257 | 22009755 |
| Breast | hsa-miR-182-5p | MIMAT0000259 | 19574223 |
| Breast | hsa-miR-182-5p | MIMAT0000259 | 22322863 |
| Breast | hsa-miR-182-5p | MIMAT0000259 | 23430586 |
| Breast | hsa-miR-185-5p | MIMAT0000455 | 20603620 |
| Breast | hsa-miR-188-5p | MIMAT0000457 | 19223510 |
| Breast | hsa-miR-18a-5p | MIMAT0000072 | 19706389 |
| Breast | hsa-miR-193b-3p | MIMAT0002819 | 19701247 |
| Breast | hsa-miR-196a-5p | MIMAT0000226 | 20736365 |
| Breast | hsa-miR-196a-5p | MIMAT0000226 | 18663355 |
| Breast | hsa-miR-196b-5p | MIMAT0001080 | 20736365 |
| Breast | hsa-miR-198 | MIMAT0000228 | 18667440 |
| Breast | hsa-miR-199a-3p | MIMAT0000232 | 21807947 |
| Breast | hsa-miR-199b-5p | MIMAT0000263 | 23354452 |
| Breast | hsa-miR-19b-3p | MIMAT0000074 | 19706389 |
| Breast | hsa-miR-200a-3p | MIMAT0000682 | 18376396 |
| Breast | hsa-miR-200b-3p | MIMAT0000318 | 18376396 |
| Breast | hsa-miR-200b-3p | MIMAT0000318 | 19839049 |
| Breast | hsa-miR-200b-3p | MIMAT0000318 | 22144583 |
| Breast | hsa-miR-200c-3p | MIMAT0000617 | 19665978 |
| Breast | hsa-miR-200c-3p | MIMAT0000617 | 19223510 |
| Breast | hsa-miR-200c-3p | MIMAT0000617 | 19839049 |
| Breast | hsa-miR-200c-3p | MIMAT0000617 | 19435871 |
| Breast | hsa-miR-200c-3p | MIMAT0000617 | 18483486 |
| Breast | hsa-miR-203a | MIMAT0000264 | 20668064 |
| Breast | hsa-miR-204-5p | MIMAT0000265 | 18922924 |
| Breast | hsa-miR-204-5p | MIMAT0000265 | 19074899 |
| Breast | hsa-miR-205-5p | MIMAT0000266 | 18376396 |
| Breast | hsa-miR-205-5p | MIMAT0000266 | 19276373 |
| Breast | hsa-miR-205-5p | MIMAT0000266 | 22578566 |
| Breast | hsa-miR-206 | MIMAT0000462 | 17312270 |
| Breast | hsa-miR-206 | MIMAT0000462 | 18593897 |
| Breast | hsa-miR-206 | MIMAT0000462 | 20388878 |
| Breast | hsa-miR-206 | MIMAT0000462 | 19414598 |
| Breast | hsa-miR-20a-5p | MIMAT0000075 | 16461460 |
| Breast | hsa-miR-20a-5p | MIMAT0000075 | 18695042 |
| Breast | hsa-miR-20a-5p | MIMAT0000075 | 20406904 |
| Breast | hsa-miR-20b-5p | MIMAT0001413 | 20232316 |
| Breast | hsa-miR-20b-5p | MIMAT0001413 | 19706389 |
| Breast | hsa-miR-21-5p | MIMAT0000076 | 19264808 |
| Breast | hsa-miR-21-5p | MIMAT0000076 | 19473551 |
| Breast | hsa-miR-21-5p | MIMAT0000076 | 20346171 |
| Breast | hsa-miR-21-5p | MIMAT0000076 | 19302977 |
| Breast | hsa-miR-21-5p | MIMAT0000076 | 21047769 |
| Breast | hsa-miR-21-5p | MIMAT0000076 | 17072344 |
| Breast | hsa-miR-21-5p | MIMAT0000076 | 17363372 |
| Breast | hsa-miR-21-5p | MIMAT0000076 | 20460403 |
| Breast | hsa-miR-21-5p | MIMAT0000076 | 19419954 |
| Breast | hsa-miR-21-5p | MIMAT0000076 | 19528081 |
| Breast | hsa-miR-21-5p | MIMAT0000076 | 18270520 |
| Breast | hsa-miR-21-5p | MIMAT0000076 | 18372920 |
| Breast | hsa-miR-21-5p | MIMAT0000076 | 17991735 |
| Breast | hsa-miR-21-5p | MIMAT0000076 | 19253296 |
| Breast | hsa-miR-210-3p | MIMAT0000267 | 19652553 |
| Breast | hsa-miR-216a-5p | MIMAT0000273 | 21149267 |
| Breast | hsa-miR-217 | MIMAT0000274 | 20668064 |
| Breast | hsa-miR-22-3p | MIMAT0000077 | 19414598 |
| Breast | hsa-miR-22-3p | MIMAT0000077 | 20180843 |
| Breast | hsa-miR-221-3p | MIMAT0000278 | 18708351 |
| Breast | hsa-miR-221-3p | MIMAT0000278 | 22009755 |
| Breast | hsa-miR-221-3p | MIMAT0000278 | 18790736 |
| Breast | hsa-miR-221-3p | MIMAT0000278 | 20388878 |
| Breast | hsa-miR-222-3p | MIMAT0000279 | 18708351 |
| Breast | hsa-miR-222-3p | MIMAT0000279 | 18790736 |
| Breast | hsa-miR-222-3p | MIMAT0000279 | 20388878 |
| Breast | hsa-miR-222-3p | MIMAT0000279 | 22009755 |
| Breast | hsa-miR-224-5p | MIMAT0000281 | 20180642 |
| Breast | hsa-miR-26a-5p | MIMAT0000082 | 16461460 |
| Breast | hsa-miR-27a-3p | MIMAT0000084 | 20382698 |
| Breast | hsa-miR-27a-3p | MIMAT0000084 | 18006846 |
| Breast | hsa-miR-27a-3p | MIMAT0000084 | 19574223 |
| Breast | hsa-miR-27b-3p | MIMAT0000419 | 16982751 |
| Breast | hsa-miR-299-5p | MIMAT0002890 | 19538464 |
| Breast | hsa-miR-29a-3p | MIMAT0000086 | 22864815 |
| Breast | hsa-miR-29b-3p | MIMAT0000100 | 21359530 |
| Breast | hsa-miR-29b-3p | MIMAT0000100 | 19706389 |
| Breast | hsa-miR-30c-5p | MIMAT0000244 | 19223510 |
| Breast | hsa-miR-30e-5p | MIMAT0000692 | 19223510 |
| Breast | hsa-miR-31-3p | MIMAT0004504 | 19524507 |
| Breast | hsa-miR-31-5p | MIMAT0000089 | 19524507 |
| Breast | hsa-miR-326 | MIMAT0000756 | 19883630 |
| Breast | hsa-miR-328-3p | MIMAT0000752 | 19270061 |
| Breast | hsa-miR-328-5p | MIMAT0026486 | 19270061 |
| Breast | hsa-miR-330-3p | MIMAT0000751 | 21149267 |
| Breast | hsa-miR-335-5p | MIMAT0000765 | 18185580 |
| Breast | hsa-miR-335-5p | MIMAT0000765 | 21618216 |
| Breast | hsa-miR-339-5p | MIMAT0000764 | 20932331 |
| Breast | hsa-miR-342-3p | MIMAT0000753 | 21172025 |
| Breast | hsa-miR-345-5p | MIMAT0000772 | 20099276 |
| Breast | hsa-miR-34a-5p | MIMAT0000255 | 23292869 |
| Breast | hsa-miR-34a-5p | MIMAT0000255 | 21240262 |
| Breast | hsa-miR-34a-5p | MIMAT0000255 | 21814748 |
| Breast | hsa-miR-373-3p | MIMAT0000726 | 18193036 |
| Breast | hsa-miR-373-3p | MIMAT0000726 | 21271679 |
| Breast | hsa-miR-375 | MIMAT0000728 | 20978187 |
| Breast | hsa-miR-448 | MIMAT0001532 | 20798686 |
| Breast | hsa-miR-451a | MIMAT0001631 | 18645025 |
| Breast | hsa-miR-483-3p | MIMAT0002173 | 20388800 |
| Breast | hsa-miR-494-3p | MIMAT0002816 | 22544933 |
| Breast | hsa-miR-510-5p | MIMAT0002882 | 18922924 |
| Breast | hsa-miR-520b | MIMAT0002843 | 20574151 |
| Breast | hsa-miR-520c-3p | MIMAT0002846 | 18193036 |
| Breast | hsa-miR-520e | MIMAT0002825 | 20574151 |
| Breast | hsa-miR-559 | MIMAT0003223 | 19584269 |
| Breast | hsa-miR-608 | MIMAT0003276 | 21149267 |
| Breast | hsa-miR-632 | MIMAT0003302 | 17980029 |
| Breast | hsa-miR-661 | MIMAT0003324 | 19584269 |
| Breast | hsa-miR-661 | MIMAT0003324 | 20543867 |
| Breast | hsa-miR-7-5p | MIMAT0000252 | 19073608 |
| Breast | hsa-miR-7-5p | MIMAT0000252 | 20099276 |
| Breast | hsa-miR-7-5p | MIMAT0000252 | 18922890 |
| Breast | hsa-miR-9-3p | MIMAT0000442 | 23530058 |
| Breast | hsa-miR-9-5p | MIMAT0000441 | 20173740 |
| Breast | hsa-miR-92a-3p | MIMAT0000092 | 20484043 |
| Breast | hsa-miR-96-5p | MIMAT0000095 | 21203424 |
| Breast | hsa-miR-96-5p | MIMAT0000095 | 19574223 |
| Breast | hsa-miR-98-5p | MIMAT0000096 | 19528081 |
| Breast | mmu-miR-10b-5p | MIMAT0000208 | 20351690 |
| Breast | mmu-miR-155-5p | MIMAT0000165 | 18794355 |
| Breast | mmu-miR-200b-3p | MIMAT0000233 | 19787069 |
| Breast | mmu-miR-200c-3p | MIMAT0000657 | 19787069 |
| Breast | mmu-miR-21a-5p | MIMAT0000530 | 18372920 |
| Breast | mmu-miR-24-2-5p | MIMAT0005440 | 22911661 |
| Breast | mmu-miR-465a-5p | MIMAT0002106 | 18922890 |
| Breast | ppy-miR-27a | MIMAT0002748 | 18006846 |
| Breast | ppy-miR-335 | MIMAT0015837 | 18185580 |
| Breast | ptr-miR-27a | MIMAT0002750 | 18006846 |
| Breast | ptr-miR-335 | MIMAT0008104 | 18185580 |
| Breast | ptr-miR-520c | MIMAT0008199 | 18193036 |
| Breast | rno-miR-200c-3p | MIMAT0000873 | 22144583 |
| Breast | rno-miR-335 | MIMAT0000575 | 18185580 |
| Breast | ssc-miR-27a | MIMAT0002148 | 18006846 |
| Breast | ssc-miR-335 | MIMAT0013955 | 18185580 |
| Breast | xtr-miR-27a | MIMAT0003570 | 18006846 |
| CA1 Region Hippocampal | hsa-miR-183-5p | MIMAT0000261 | 19711202 |
| CA1 Region Hippocampal | rno-miR-183-5p | MIMAT0000860 | 19711202 |
| Capillaries | hsa-miR-29b-3p | MIMAT0000100 | 21793034 |
| Cardiovascular System | hsa-miR-195-5p | MIMAT0000461 | 22802111 |
| Cardiovascular System | mmu-miR-27b-3p | MIMAT0000126 | 20736237 |
| Carotid Arteries | hsa-miR-1 | MIMAT0000416 | 21051663 |
| Carotid Arteries | hsa-miR-195-5p | MIMAT0000461 | 22802111 |
| Carotid Arteries | hsa-miR-21-5p | MIMAT0000076 | 22034194 |
| Carotid Arteries | hsa-miR-21-5p | MIMAT0000076 | 17478730 |
| Carotid Arteries | hsa-miR-221-3p | MIMAT0000278 | 19150885 |
| Carotid Arteries | hsa-miR-222-3p | MIMAT0000279 | 19150885 |
| Carotid Arteries | hsa-miR-616-3p | MIMAT0004805 | 23497787 |
| Carotid Arteries | rno-miR-145-5p | MIMAT0000851 | 19542014 |
| Carotid Arteries | rno-miR-21-5p | MIMAT0000790 | 17478730 |
| Carotid Arteries | rno-miR-221-3p | MIMAT0000890 | 19150885 |
| Carotid Arteries | rno-miR-222-3p | MIMAT0000891 | 19150885 |
| Carotid Arteries | rno-miR-31a-5p | MIMAT0000810 | 19542014 |
| Carotid Arteries | rno-miR-31a-5p | MIMAT0000810 | 22020941 |
| Carotid Artery Internal | hsa-miR-616-3p | MIMAT0004805 | 23497787 |
| Cartilage | hsa-miR-22-3p | MIMAT0000077 | 19011694 |
| Cartilage | hsa-miR-9-5p | MIMAT0000441 | 19008124 |
| Cartilage | mmu-miR-125b-5p | MIMAT0000136 | 21945074 |
| Cartilage | mmu-miR-140-5p | MIMAT0000151 | 16828749 |
| Cartilage | mmu-miR-140-5p | MIMAT0000151 | 21872590 |
| Cartilage | mmu-miR-199a-3p | MIMAT0000230 | 19251704 |
| Cartilage | mmu-miR-30a-5p | MIMAT0000128 | 21945074 |
| Cartilage | mmu-miR-30c-5p | MIMAT0000514 | 21945074 |
| Cell Membrane | hsa-miR-1 | MIMAT0000416 | 17401374 |
| Cell Membrane | hsa-miR-204-5p | MIMAT0000265 | 20056717 |
| Cell Membrane | hsa-miR-21-5p | MIMAT0000076 | 20056717 |
| Cell Membrane | rno-miR-1-3p | MIMAT0003125 | 17401374 |
| Central Nervous System | hsa-miR-1 | MIMAT0000416 | 21169019 |
| Central Nervous System | hsa-miR-124-3p | MIMAT0000422 | 18577219 |
| Central Nervous System | hsa-miR-124-3p | MIMAT0000422 | 23318130 |
| Central Nervous System | hsa-miR-125a-5p | MIMAT0000443 | 21220473 |
| Central Nervous System | hsa-miR-133b | MIMAT0000770 | 17761882 |
| Central Nervous System | hsa-miR-137 | MIMAT0000429 | 18577219 |
| Central Nervous System | hsa-miR-19b-3p | MIMAT0000074 | 20435064 |
| Central Nervous System | hsa-miR-29a-3p | MIMAT0000086 | 19584290 |
| Central Nervous System | hsa-miR-29a-3p | MIMAT0000086 | 21169019 |
| Central Nervous System | hsa-miR-302b-5p | MIMAT0000714 | 20435064 |
| Central Nervous System | hsa-miR-323a-3p | MIMAT0000755 | 20435064 |
| Central Nervous System | mmu-miR-124-3p | MIMAT0000134 | 18577219 |
| Central Nervous System | mmu-miR-124-3p | MIMAT0000134 | 21131957 |
| Central Nervous System | mmu-miR-134-5p | MIMAT0000146 | 20622856 |
| Central Nervous System | mmu-miR-137-3p | MIMAT0000149 | 18577219 |
| Central Nervous System | mmu-miR-137-5p | MIMAT0016986 | 18577219 |
| Central Nervous System | mmu-miR-155-5p | MIMAT0000165 | 21247879 |
| Central Nervous System | mmu-miR-23a-3p | MIMAT0000532 | 19259393 |
| Central Nervous System | mmu-miR-23b-3p | MIMAT0000125 | 19259393 |
| Central Nervous System | mmu-miR-298-5p | MIMAT0000376 | 21247879 |
| Central Nervous System | mmu-miR-351-5p | MIMAT0000609 | 21247879 |
| Central Nervous System | mmu-miR-9-5p | MIMAT0000142 | 21238922 |
| Central Nervous System | rno-miR-140-3p | MIMAT0000574 | 18845019 |
| Central Nervous System | rno-miR-34a-5p | MIMAT0000815 | 18704095 |
| Cerebellum | hsa-miR-124-3p | MIMAT0000422 | 18607543 |
| Cerebellum | hsa-miR-199b-5p | MIMAT0000263 | 19308264 |
| Cerebral Cortex | hsa-miR-29a-3p | MIMAT0000086 | 20202123 |
| Cerebral Cortex | hsa-miR-34a-5p | MIMAT0000255 | 19683563 |
| Cerebral Cortex | mmu-miR-34a-5p | MIMAT0000542 | 19683563 |
| Cervix Uteri | hsa-miR-218-5p | MIMAT0000275 | 17998940 |
| CHO Cells | mmu-miR-466h-5p | MIMAT0004884 | 21337326 |
| Chondrocytes | hsa-miR-140-5p | MIMAT0000431 | 21576357 |
| Chondrocytes | hsa-miR-140-5p | MIMAT0000431 | 19948051 |
| Chondrocytes | hsa-miR-199a-5p | MIMAT0000231 | 22441842 |
| Chondrocytes | hsa-miR-22-3p | MIMAT0000077 | 19011694 |
| Chondrocytes | hsa-miR-27a-3p | MIMAT0000084 | 19948051 |
| Chondrocytes | hsa-miR-27b-3p | MIMAT0000419 | 20131257 |
| Chondrocytes | hsa-miR-29a-3p | MIMAT0000086 | 21665270 |
| Chondrocytes | hsa-miR-29b-3p | MIMAT0000100 | 21665270 |
| Chondrocytes | hsa-miR-9-5p | MIMAT0000441 | 19008124 |
| Chondrocytes | mmu-miR-125b-5p | MIMAT0000136 | 21945074 |
| Chondrocytes | mmu-miR-140-5p | MIMAT0000151 | 21872590 |
| Chondrocytes | mmu-miR-140-5p | MIMAT0000151 | 21576357 |
| Chondrocytes | mmu-miR-29a-3p | MIMAT0000535 | 21665270 |
| Chondrocytes | mmu-miR-29b-3p | MIMAT0000127 | 21665270 |
| Chondrocytes | mmu-miR-30a-5p | MIMAT0000128 | 21945074 |
| Chondrocytes | mmu-miR-30c-5p | MIMAT0000514 | 21945074 |
| Choroid | hsa-miR-204-5p | MIMAT0000265 | 20056717 |
| Choroid | hsa-miR-21-5p | MIMAT0000076 | 20056717 |
| Choroid | mmu-miR-449a-5p | MIMAT0001542 | 19056356 |
| Choroid Plexus | mmu-miR-449a-5p | MIMAT0001542 | 19056356 |
| Cilia | rno-miR-126a-5p | MIMAT0000831 | 19102782 |
| Cilia | rno-miR-128-1-5p | MIMAT0017118 | 19102782 |
| Cilia | rno-miR-136-5p | MIMAT0000842 | 19102782 |
| Cilia | rno-miR-147 | MIMAT0005297 | 19102782 |
| Cilia | rno-miR-181b-5p | MIMAT0000859 | 19102782 |
| Cilia | rno-miR-196a-5p | MIMAT0000871 | 19102782 |
| Cilia | rno-miR-203a-5p | MIMAT0017153 | 19102782 |
| Cilia | rno-miR-20a-5p | MIMAT0000602 | 19102782 |
| Cilia | rno-miR-21-5p | MIMAT0000790 | 19102782 |
| Cilia | rno-miR-216a-5p | MIMAT0000886 | 19102782 |
| Cilia | rno-miR-217-5p | MIMAT0000887 | 19102782 |
| Cilia | rno-miR-30a-5p | MIMAT0000808 | 19102782 |
| Cilia | rno-miR-31a-5p | MIMAT0000810 | 19102782 |
| Cilia | rno-miR-335 | MIMAT0000575 | 19102782 |
| Cilia | rno-miR-346 | MIMAT0000596 | 19102782 |
| Cilia | rno-miR-34b-5p | MIMAT0000813 | 19102782 |
| Cilia | rno-miR-377-5p | MIMAT0017203 | 19102782 |
| Cilia | rno-miR-379-5p | MIMAT0003192 | 19102782 |
| Cilia | rno-miR-380-5p | MIMAT0005308 | 19102782 |
| Cilia | rno-miR-448-5p | MIMAT0017177 | 19102782 |
| Cilia | rno-miR-7a-5p | MIMAT0000606 | 19102782 |
| Cilia | rno-miR-7b | MIMAT0000780 | 19102782 |
| Cilia | rno-miR-96-5p | MIMAT0000818 | 19102782 |
| Cilia | rno-miR-99a-5p | MIMAT0000820 | 19102782 |
| Clone Cells | hsa-miR-196a-5p | MIMAT0000226 | 21077158 |
| Clone Cells | hsa-miR-199b-5p | MIMAT0000263 | 21557766 |
| Clone Cells | mmu-miR-106b-5p | MIMAT0000386 | 21285944 |
| Clone Cells | mmu-miR-216a-5p | MIMAT0000662 | 20713358 |
| Clone Cells | mmu-miR-93-5p | MIMAT0000540 | 21285944 |
| Cochlea | mmu-miR-15a-5p | MIMAT0000526 | 19416898 |
| Colon | bta-miR-143 | MIMAT0009233 | 17504027 |
| Colon | cfa-miR-143 | MIMAT0006682 | 17504027 |
| Colon | dre-miR-143 | MIMAT0001840 | 17504027 |
| Colon | hsa-let-7a-5p | MIMAT0000062 | 16651716 |
| Colon | hsa-let-7a-5p | MIMAT0000062 | 17942906 |
| Colon | hsa-let-7b-3p | MIMAT0004482 | 18379589 |
| Colon | hsa-let-7b-5p | MIMAT0000063 | 18379589 |
| Colon | hsa-let-7b-5p | MIMAT0000063 | 17942906 |
| Colon | hsa-miR-106a-5p | MIMAT0000103 | 16461460 |
| Colon | hsa-miR-106b-5p | MIMAT0000680 | 21283757 |
| Colon | hsa-miR-107 | MIMAT0000104 | 20308559 |
| Colon | hsa-miR-126-3p | MIMAT0000445 | 18663744 |
| Colon | hsa-miR-128-3p | MIMAT0000424 | 20388705 |
| Colon | hsa-miR-137 | MIMAT0000429 | 20682795 |
| Colon | hsa-miR-137 | MIMAT0000429 | 23400681 |
| Colon | hsa-miR-140-5p | MIMAT0000431 | 19734943 |
| Colon | hsa-miR-141-3p | MIMAT0000432 | 18835392 |
| Colon | hsa-miR-143-3p | MIMAT0000435 | 17892514 |
| Colon | hsa-miR-143-3p | MIMAT0000435 | 19638978 |
| Colon | hsa-miR-143-3p | MIMAT0000435 | 19843160 |
| Colon | hsa-miR-143-3p | MIMAT0000435 | 19439999 |
| Colon | hsa-miR-143-3p | MIMAT0000435 | 19464056 |
| Colon | hsa-miR-143-3p | MIMAT0000435 | 16969504 |
| Colon | hsa-miR-143-3p | MIMAT0000435 | 17504027 |
| Colon | hsa-miR-143-3p | MIMAT0000435 | 21276449 |
| Colon | hsa-miR-145-5p | MIMAT0000437 | 21092188 |
| Colon | hsa-miR-145-5p | MIMAT0000437 | 20098684 |
| Colon | hsa-miR-145-5p | MIMAT0000437 | 20687965 |
| Colon | hsa-miR-145-5p | MIMAT0000437 | 20737575 |
| Colon | hsa-miR-145-5p | MIMAT0000437 | 19391107 |
| Colon | hsa-miR-155-5p | MIMAT0000646 | 20427544 |
| Colon | hsa-miR-15b-5p | MIMAT0000417 | 16609010 |
| Colon | hsa-miR-181b-5p | MIMAT0000257 | 20797623 |
| Colon | hsa-miR-183-5p | MIMAT0000261 | 21118966 |
| Colon | hsa-miR-186-5p | MIMAT0000456 | 23137536 |
| Colon | hsa-miR-18a-3p | MIMAT0002891 | 19372139 |
| Colon | hsa-miR-192-5p | MIMAT0000222 | 18835392 |
| Colon | hsa-miR-192-5p | MIMAT0000222 | 19088023 |
| Colon | hsa-miR-195-5p | MIMAT0000461 | 23526568 |
| Colon | hsa-miR-199b-5p | MIMAT0000263 | 23354452 |
| Colon | hsa-miR-200a-3p | MIMAT0000682 | 18835392 |
| Colon | hsa-miR-20a-5p | MIMAT0000075 | 16461460 |
| Colon | hsa-miR-21-5p | MIMAT0000076 | 19826040 |
| Colon | hsa-miR-21-5p | MIMAT0000076 | 19836969 |
| Colon | hsa-miR-21-5p | MIMAT0000076 | 19302977 |
| Colon | hsa-miR-21-5p | MIMAT0000076 | 21069438 |
| Colon | hsa-miR-21-5p | MIMAT0000076 | 22072622 |
| Colon | hsa-miR-21-5p | MIMAT0000076 | 18372920 |
| Colon | hsa-miR-21-5p | MIMAT0000076 | 20797623 |
| Colon | hsa-miR-21-5p | MIMAT0000076 | 18508928 |
| Colon | hsa-miR-212-3p | MIMAT0000269 | 18162065 |
| Colon | hsa-miR-216b-5p | MIMAT0004959 | 23137536 |
| Colon | hsa-miR-217 | MIMAT0000274 | 18835392 |
| Colon | hsa-miR-221-3p | MIMAT0000278 | 21278784 |
| Colon | hsa-miR-25-3p | MIMAT0000081 | 23435373 |
| Colon | hsa-miR-26a-5p | MIMAT0000082 | 16461460 |
| Colon | hsa-miR-27b-3p | MIMAT0000419 | 20388705 |
| Colon | hsa-miR-27b-3p | MIMAT0000419 | 18835392 |
| Colon | hsa-miR-29a-3p | MIMAT0000086 | 19951903 |
| Colon | hsa-miR-320a | MIMAT0000510 | 22134529 |
| Colon | hsa-miR-337-3p | MIMAT0000754 | 23137536 |
| Colon | hsa-miR-34a-5p | MIMAT0000255 | 17875987 |
| Colon | hsa-miR-34a-5p | MIMAT0000255 | 18755897 |
| Colon | hsa-miR-34a-5p | MIMAT0000255 | 21240262 |
| Colon | hsa-miR-34a-5p | MIMAT0000255 | 20433755 |
| Colon | hsa-miR-362-3p | MIMAT0004683 | 23280316 |
| Colon | hsa-miR-365a-3p | MIMAT0000710 | 22072615 |
| Colon | hsa-miR-483-3p | MIMAT0002173 | 20388800 |
| Colon | hsa-miR-499a-5p | MIMAT0002870 | 21934092 |
| Colon | hsa-miR-499b-5p | MIMAT0019897 | 21934092 |
| Colon | hsa-miR-519a-3p | MIMAT0002869 | 19088191 |
| Colon | hsa-miR-519b-3p | MIMAT0002837 | 19088191 |
| Colon | hsa-miR-519c-3p | MIMAT0002832 | 19088191 |
| Colon | hsa-miR-519c-3p | MIMAT0002832 | 18573883 |
| Colon | hsa-miR-532-5p | MIMAT0002888 | 18835392 |
| Colon | hsa-miR-562 | MIMAT0003226 | 19789318 |
| Colon | hsa-miR-603 | MIMAT0003271 | 18835392 |
| Colon | hsa-miR-630 | MIMAT0003299 | 23435373 |
| Colon | hsa-miR-633 | MIMAT0003303 | 20637737 |
| Colon | hsa-miR-675-5p | MIMAT0004284 | 19926638 |
| Colon | hsa-miR-760 | MIMAT0004957 | 23137536 |
| Colon | hsa-miR-769-5p | MIMAT0003886 | 18835392 |
| Colon | hsa-miR-98-5p | MIMAT0000096 | 17942906 |
| Colon | mmu-miR-128-3p | MIMAT0000140 | 20388705 |
| Colon | mmu-miR-140-5p | MIMAT0000151 | 19734943 |
| Colon | mmu-miR-21a-5p | MIMAT0000530 | 18508928 |
| Colon | mmu-miR-21a-5p | MIMAT0000530 | 18372920 |
| Colon | mmu-miR-223-3p | MIMAT0000665 | 22043014 |
| Colon | mmu-miR-27b-3p | MIMAT0000126 | 20388705 |
| Colon | ppy-miR-143 | MIMAT0002259 | 17504027 |
| Colon | ptr-miR-143 | MIMAT0002257 | 17504027 |
| Colon | rno-let-7a-5p | MIMAT0000774 | 17942906 |
| Colon | xtr-miR-143 | MIMAT0003686 | 17504027 |
| Connective Tissue | hsa-miR-146a-5p | MIMAT0000449 | 20375304 |
| Connective Tissue | hsa-miR-18a-5p | MIMAT0000072 | 23249750 |
| Connective Tissue | rno-miR-192-5p | MIMAT0000867 | 20393144 |
| Connective Tissue | rno-miR-215 | MIMAT0003118 | 20393144 |
| Cornea | hsa-miR-126-3p | MIMAT0000445 | 18987025 |
| Cornea | mmu-miR-126a-3p | MIMAT0000138 | 18987025 |
| Cornea | mmu-miR-150-5p | MIMAT0000160 | 18500251 |
| Cornea | mmu-miR-184-3p | MIMAT0000213 | 18500251 |
| Cornea | mmu-miR-31-5p | MIMAT0000538 | 18500251 |
| Coronary Vessels | hsa-miR-1 | MIMAT0000416 | 17401374 |
| Coronary Vessels | hsa-miR-1 | MIMAT0000416 | 19775284 |
| Coronary Vessels | hsa-miR-216a-5p | MIMAT0000273 | 19786632 |
| Coronary Vessels | hsa-miR-217 | MIMAT0000274 | 19786632 |
| Coronary Vessels | hsa-miR-31-5p | MIMAT0000089 | 23518389 |
| Coronary Vessels | rno-miR-1-3p | MIMAT0003125 | 17401374 |
| Coronary Vessels | rno-miR-1-3p | MIMAT0003125 | 19775284 |
| Cytoplasm | hsa-let-7b-3p | MIMAT0004482 | 17437991 |
| Cytoplasm | hsa-let-7b-5p | MIMAT0000063 | 17437991 |
| Cytoplasm | hsa-let-7b-5p | MIMAT0000063 | 16971064 |
| Cytoplasm | hsa-let-7e-3p | MIMAT0004485 | 17437991 |
| Cytoplasm | hsa-let-7e-5p | MIMAT0000066 | 17437991 |
| Cytoplasm | hsa-miR-195-5p | MIMAT0000461 | 22217655 |
| Cytoplasm | hsa-miR-200c-3p | MIMAT0000617 | 22015043 |
| Cytoplasm | hsa-miR-29a-3p | MIMAT0000086 | 20041405 |
| Cytoplasm | hsa-miR-29b-3p | MIMAT0000100 | 20041405 |
| Cytoplasm | hsa-miR-29c-3p | MIMAT0000681 | 20041405 |
| Cytoplasm | hsa-miR-320a | MIMAT0000510 | 18852463 |
| Cytoplasm | hsa-miR-34a-5p | MIMAT0000255 | 20433755 |
| Cytoplasm | hsa-miR-9-3p | MIMAT0000442 | 19118166 |
| Cytoplasm | hsa-miR-9-5p | MIMAT0000441 | 19118166 |
| Cytoplasm | mmu-miR-124-3p | MIMAT0000134 | 19663910 |
| Cytoskeleton | hsa-miR-1 | MIMAT0000416 | 20571053 |
| Cytoskeleton | hsa-miR-126-3p | MIMAT0000445 | 20571053 |
| Cytoskeleton | hsa-miR-141-3p | MIMAT0000432 | 20584986 |
| Cytoskeleton | hsa-miR-196a-5p | MIMAT0000226 | 21077158 |
| Cytoskeleton | hsa-miR-200a-3p | MIMAT0000682 | 19801681 |
| Cytoskeleton | hsa-miR-200b-3p | MIMAT0000318 | 22144583 |
| Cytoskeleton | hsa-miR-200b-3p | MIMAT0000318 | 19801681 |
| Cytoskeleton | hsa-miR-21-5p | MIMAT0000076 | 20584986 |
| Cytoskeleton | hsa-miR-375 | MIMAT0000728 | 20584986 |
| Cytoskeleton | hsa-miR-429 | MIMAT0001536 | 19801681 |
| Cytoskeleton | hsa-miR-9-5p | MIMAT0000441 | 22131135 |
| Cytoskeleton | mmu-miR-124-3p | MIMAT0000134 | 18619591 |
| Cytoskeleton | mmu-miR-141-3p | MIMAT0000153 | 20584986 |
| Cytoskeleton | mmu-miR-375-3p | MIMAT0000739 | 20584986 |
| Cytoskeleton | rno-miR-141-3p | MIMAT0000846 | 20584986 |
| Cytoskeleton | rno-miR-200c-3p | MIMAT0000873 | 22144583 |
| Cytoskeleton | rno-miR-21-5p | MIMAT0000790 | 20584986 |
| Cytosol | hsa-miR-34a-5p | MIMAT0000255 | 20433755 |
| Dendrites | mmu-miR-134-5p | MIMAT0000146 | 20126250 |
| Dendrites | rno-miR-26a-5p | MIMAT0000796 | 17592044 |
| Dendritic Cells | hsa-let-7e-3p | MIMAT0004485 | 19398721 |
| Dendritic Cells | hsa-let-7e-5p | MIMAT0000066 | 19398721 |
| Dendritic Cells | hsa-let-7i-5p | MIMAT0000415 | 21742974 |
| Dendritic Cells | hsa-miR-146a-5p | MIMAT0000449 | 21236257 |
| Dendritic Cells | hsa-miR-146a-5p | MIMAT0000449 | 20375304 |
| Dendritic Cells | hsa-miR-155-3p | MIMAT0004658 | 20852130 |
| Dendritic Cells | hsa-miR-155-5p | MIMAT0000646 | 19386588 |
| Dendritic Cells | hsa-miR-155-5p | MIMAT0000646 | 20852130 |
| Dendritic Cells | hsa-miR-155-5p | MIMAT0000646 | 19193853 |
| Dendritic Cells | hsa-miR-181a-5p | MIMAT0000256 | 22956783 |
| Dendritic Cells | hsa-miR-181a-5p | MIMAT0000256 | 20841506 |
| Dendritic Cells | hsa-miR-21-5p | MIMAT0000076 | 19398721 |
| Dendritic Cells | hsa-miR-29a-3p | MIMAT0000086 | 21276447 |
| Dendritic Cells | hsa-miR-34a-5p | MIMAT0000255 | 19398721 |
| Dendritic Cells | mmu-miR-148a-3p | MIMAT0000516 | 21068402 |
| Dendritic Cells | mmu-miR-148b-3p | MIMAT0000580 | 21068402 |
| Dendritic Cells | mmu-miR-152-3p | MIMAT0000162 | 21068402 |
| Dendritic Cells | mmu-miR-155-5p | MIMAT0000165 | 17463290 |
| Dendritic Cells | mmu-miR-155-5p | MIMAT0000165 | 21385848 |
| Dendritic Cells | mmu-miR-155-5p | MIMAT0000165 | 19193853 |
| Dendritic Spines | hsa-miR-125b-5p | MIMAT0000423 | 20159450 |
| Dendritic Spines | hsa-miR-132-3p | MIMAT0000426 | 19850129 |
| Dendritic Spines | rno-miR-134-5p | MIMAT0000840 | 16421561 |
| Dentate Gyrus | rno-miR-21-5p | MIMAT0000790 | 21154462 |
| Dermis | hsa-miR-424-5p | MIMAT0001341 | 21179471 |
| Duodenum | mmu-miR-124-3p | MIMAT0000134 | 17462994 |
| Ear | hsa-miR-96-5p | MIMAT0000095 | 19363479 |
| Ear | mmu-miR-15a-5p | MIMAT0000526 | 19416898 |
| Ear Inner | hsa-miR-96-5p | MIMAT0000095 | 19363479 |
| Ear Inner | mmu-miR-15a-5p | MIMAT0000526 | 19416898 |
| Ectoderm | mmu-let-7a-5p | MIMAT0000521 | 19898466 |
| Ectoderm | mmu-let-7e-5p | MIMAT0000524 | 19898466 |
| Ectoderm | mmu-miR-125a-5p | MIMAT0000135 | 19898466 |
| Ectoderm | mmu-miR-125b-5p | MIMAT0000136 | 19898466 |
| Ectoderm | mmu-miR-128-3p | MIMAT0000140 | 19898466 |
| Embryoid Bodies | hsa-miR-302d-3p | MIMAT0000718 | 19229866 |
| Embryoid Bodies | hsa-miR-372-3p | MIMAT0000724 | 19229866 |
| Embryonal Carcinoma Stem | hsa-miR-125a-5p | MIMAT0000443 | 16227573 |
| Cells | | | |
| Embryonal Carcinoma Stem | hsa-miR-125b-5p | MIMAT0000423 | 16227573 |
| Cells | | | |
| Embryonal Carcinoma Stem | hsa-miR-200c-3p | MIMAT0000617 | 19665978 |
| Cells | | | |
| Embryonal Carcinoma Stem | hsa-miR-383-5p | MIMAT0000738 | 21368870 |
| Cells | | | |
| Embryonal Carcinoma Stem | mmu-miR-125b-5p | MIMAT0000136 | 16227573 |
| Cells | | | |
| Embryonic Stem Cells | hsa-miR-1 | MIMAT0000416 | 20081117 |
| Embryonic Stem Cells | hsa-miR-101-3p | MIMAT0000099 | 19818710 |
| Embryonic Stem Cells | hsa-miR-124-3p | MIMAT0000422 | 20362537 |
| Embryonic Stem Cells | hsa-miR-126-3p | MIMAT0000445 | 21304604 |
| Embryonic Stem Cells | hsa-miR-128-3p | MIMAT0000424 | 19409607 |
| Embryonic Stem Cells | hsa-miR-145-5p | MIMAT0000437 | 19409607 |
| Embryonic Stem Cells | hsa-miR-145-5p | MIMAT0000437 | 20382729 |
| Embryonic Stem Cells | hsa-miR-195-5p | MIMAT0000461 | 19823043 |
| Embryonic Stem Cells | hsa-miR-199a-5p | MIMAT0000231 | 19818710 |
| Embryonic Stem Cells | hsa-miR-203a | MIMAT0000264 | 18483491 |
| Embryonic Stem Cells | hsa-miR-214-3p | MIMAT0000271 | 19818710 |
| Embryonic Stem Cells | hsa-miR-26b-5p | MIMAT0000083 | 20831567 |
| Embryonic Stem Cells | hsa-miR-302a-3p | MIMAT0000684 | 21266536 |
| Embryonic Stem Cells | hsa-miR-302a-3p | MIMAT0000684 | 21062975 |
| Embryonic Stem Cells | hsa-miR-302a-3p | MIMAT0000684 | 19386261 |
| Embryonic Stem Cells | hsa-miR-302a-3p | MIMAT0000684 | 21151097 |
| Embryonic Stem Cells | hsa-miR-302a-3p | MIMAT0000684 | 23185040 |
| Embryonic Stem Cells | hsa-miR-302b-3p | MIMAT0000715 | 23185040 |
| Embryonic Stem Cells | hsa-miR-302b-3p | MIMAT0000715 | 21062975 |
| Embryonic Stem Cells | hsa-miR-302c-3p | MIMAT0000717 | 23185040 |
| Embryonic Stem Cells | hsa-miR-302c-3p | MIMAT0000717 | 21062975 |
| Embryonic Stem Cells | hsa-miR-302d-3p | MIMAT0000718 | 19229866 |
| Embryonic Stem Cells | hsa-miR-302d-3p | MIMAT0000718 | 23185040 |
| Embryonic Stem Cells | hsa-miR-302d-3p | MIMAT0000718 | 21266536 |
| Embryonic Stem Cells | hsa-miR-302d-3p | MIMAT0000718 | 21062975 |
| Embryonic Stem Cells | hsa-miR-372-3p | MIMAT0000724 | 19823043 |
| Embryonic Stem Cells | hsa-miR-372-3p | MIMAT0000724 | 19229866 |
| Embryonic Stem Cells | hsa-miR-375 | MIMAT0000728 | 19807270 |
| Embryonic Stem Cells | hsa-miR-380-5p | MIMAT0000734 | 20871609 |
| Embryonic Stem Cells | hsa-miR-499a-5p | MIMAT0002870 | 20081117 |
| Embryonic Stem Cells | hsa-miR-499b-5p | MIMAT0019897 | 20081117 |
| Embryonic Stem Cells | hsa-miR-519c-3p | MIMAT0002832 | 19825807 |
| Embryonic Stem Cells | hsa-miR-520h | MIMAT0002867 | 19825807 |
| Embryonic Stem Cells | hsa-miR-522-3p | MIMAT0002868 | 21304604 |
| Embryonic Stem Cells | hsa-miR-9-5p | MIMAT0000441 | 20362537 |
| Embryonic Stem Cells | hsa-miR-92b-3p | MIMAT0003218 | 19544458 |
| Embryonic Stem Cells | hsa-miR-98-5p | MIMAT0000096 | 19818710 |
| Embryonic Stem Cells | mmu-let-7c-5p | MIMAT0000523 | 20054295 |
| Embryonic Stem Cells | mmu-miR-100-3p | MIMAT0017051 | 20439489 |
| Embryonic Stem Cells | mmu-miR-100-5p | MIMAT0000655 | 20439489 |
| Embryonic Stem Cells | mmu-miR-10a-3p | MIMAT0004659 | 20118242 |
| Embryonic Stem Cells | mmu-miR-10a-5p | MIMAT0000648 | 20118242 |
| Embryonic Stem Cells | mmu-miR-134-5p | MIMAT0000146 | 17916804 |
| Embryonic Stem Cells | mmu-miR-134-5p | MIMAT0000146 | 18806776 |
| Embryonic Stem Cells | mmu-miR-137-3p | MIMAT0000149 | 20439489 |
| Embryonic Stem Cells | mmu-miR-137-5p | MIMAT0016986 | 20439489 |
| Embryonic Stem Cells | mmu-miR-1a-3p | MIMAT0000123 | 19521018 |
| Embryonic Stem Cells | mmu-miR-1a-3p | MIMAT0000123 | 20799856 |
| Embryonic Stem Cells | mmu-miR-214-3p | MIMAT0000661 | 19818710 |
| Embryonic Stem Cells | mmu-miR-290a-3p | MIMAT0004572 | 19628328 |
| Embryonic Stem Cells | mmu-miR-291a-3p | MIMAT0000368 | 19628328 |
| Embryonic Stem Cells | mmu-miR-292-3p | MIMAT0000370 | 19628328 |
| Embryonic Stem Cells | mmu-miR-293-3p | MIMAT0000371 | 19628328 |
| Embryonic Stem Cells | mmu-miR-294-3p | MIMAT0000372 | 19628328 |
| Embryonic Stem Cells | mmu-miR-295-3p | MIMAT0000373 | 19628328 |
| Embryonic Stem Cells | mmu-miR-296-5p | MIMAT0000374 | 18806776 |
| Embryonic Stem Cells | mmu-miR-466l-3p | MIMAT0005830 | 20410487 |
| Embryonic Stem Cells | mmu-miR-470-5p | MIMAT0002111 | 18806776 |
| Embryonic Stem Cells | mmu-miR-9-5p | MIMAT0000142 | 22465325 |
| Embryonic Stem Cells | mmu-miR-9-5p | MIMAT0000142 | 20362537 |
| Embryonic Structures | hsa-miR-122-5p | MIMAT0000421 | 20842632 |
| Embryonic Structures | hsa-miR-125b-5p | MIMAT0000423 | 19293287 |
| Embryonic Structures | hsa-miR-126-3p | MIMAT0000445 | 18694566 |
| Embryonic Structures | hsa-miR-155-5p | MIMAT0000646 | 19701459 |
| Embryonic Structures | hsa-miR-155-5p | MIMAT0000646 | 19759154 |
| Embryonic Structures | hsa-miR-196a-5p | MIMAT0000226 | 15105502 |
| Embryonic Structures | hsa-miR-19a-3p | MIMAT0000073 | 19296935 |
| Embryonic Structures | hsa-miR-21-5p | MIMAT0000076 | 20813833 |
| Embryonic Structures | hsa-miR-222-3p | MIMAT0000279 | 19589872 |
| Embryonic Structures | hsa-miR-24-3p | MIMAT0000080 | 19296935 |
| Embryonic Structures | hsa-miR-27a-3p | MIMAT0000084 | 19666532 |
| Embryonic Structures | hsa-miR-27a-3p | MIMAT0000084 | 19114653 |
| Embryonic Structures | hsa-miR-27b-3p | MIMAT0000419 | 19666532 |
| Embryonic Structures | hsa-miR-302a-3p | MIMAT0000684 | 19386261 |
| Embryonic Structures | mmu-miR-101a-3p | MIMAT0000133 | 17848513 |
| Embryonic Structures | mmu-miR-130a-3p | MIMAT0000141 | 19582148 |
| Embryonic Structures | mmu-miR-133a-3p | MIMAT0000145 | 16380711 |
| Embryonic Structures | mmu-miR-135a-5p | MIMAT0000147 | 20619502 |
| Embryonic Structures | mmu-miR-137-3p | MIMAT0000149 | 21256124 |
| Embryonic Structures | mmu-miR-140-5p | MIMAT0000151 | 16828749 |
| Embryonic Structures | mmu-miR-153-3p | MIMAT0000163 | 21256124 |
| Embryonic Structures | mmu-miR-155-5p | MIMAT0000165 | 19701459 |
| Embryonic Structures | mmu-miR-16-5p | MIMAT0000527 | 20619502 |
| Embryonic Structures | mmu-miR-18a-5p | MIMAT0000528 | 19114653 |
| Embryonic Structures | mmu-miR-196a-5p | MIMAT0000518 | 15105502 |
| Embryonic Structures | mmu-miR-196a-5p | MIMAT0000518 | 15361871 |
| Embryonic Structures | mmu-miR-199a-3p | MIMAT0000230 | 17848513 |
| Embryonic Structures | mmu-miR-199a-3p | MIMAT0000230 | 19114653 |
| Embryonic Structures | mmu-miR-1a-3p | MIMAT0000123 | 16380711 |
| Embryonic Structures | mmu-miR-20a-5p | MIMAT0000529 | 20619502 |
| Embryonic Structures | mmu-miR-21a-5p | MIMAT0000530 | 18556655 |
| Embryonic Structures | mmu-miR-27a-3p | MIMAT0000537 | 19114653 |
| Embryonic Structures | mmu-miR-29b-3p | MIMAT0000127 | 19509302 |
| Embryonic Structures | mmu-miR-30c-5p | MIMAT0000514 | 19114653 |
| Embryonic Structures | mmu-miR-363-3p | MIMAT0000708 | 21256124 |
| Embryonic Structures | mmu-miR-9-5p | MIMAT0000142 | 19114653 |
| Endocrine Cells | hsa-miR-375 | MIMAT0000728 | 15538371 |
| Endocrine Cells | mmu-miR-375-3p | MIMAT0000739 | 15538371 |
| Endocrine System | hsa-miR-1 | MIMAT0000416 | 21169019 |
| Endocrine System | hsa-miR-29a-3p | MIMAT0000086 | 21169019 |
| Endoderm | hsa-miR-375 | MIMAT0000728 | 19807270 |
| Endometrium | hsa-miR-153-3p | MIMAT0000439 | 20028871 |
| Endometrium | hsa-miR-183-5p | MIMAT0000261 | 20028871 |
| Endometrium | hsa-miR-186-5p | MIMAT0000456 | 20028871 |
| Endometrium | hsa-miR-196b-5p | MIMAT0001080 | 23293219 |
| Endometrium | hsa-miR-27a-3p | MIMAT0000084 | 20028871 |
| Endometrium | hsa-miR-29c-3p | MIMAT0000681 | 21436257 |
| Endometrium | hsa-miR-9-5p | MIMAT0000441 | 20028871 |
| Endometrium | hsa-miR-96-5p | MIMAT0000095 | 20028871 |
| Endoplasmic Reticulum | hsa-miR-346 | MIMAT0000773 | 22002058 |
| Endosomes | hsa-let-7d-5p | MIMAT0000065 | 20410187 |
| Endothelial Cells | hsa-miR-10a-5p | MIMAT0000253 | 20624982 |
| Endothelial Cells | hsa-miR-10b-5p | MIMAT0000254 | 21642433 |
| Endothelial Cells | hsa-miR-122-5p | MIMAT0000421 | 19726678 |
| Endothelial Cells | hsa-miR-126-3p | MIMAT0000445 | 18227515 |
| Endothelial Cells | hsa-miR-126-3p | MIMAT0000445 | 18694566 |
| Endothelial Cells | hsa-miR-126-3p | MIMAT0000445 | 22867989 |
| Endothelial Cells | hsa-miR-130a-3p | MIMAT0000425 | 17957028 |
| Endothelial Cells | hsa-miR-146a-5p | MIMAT0000449 | 18174313 |
| Endothelial Cells | hsa-miR-146a-5p | MIMAT0000449 | 19944095 |
| Endothelial Cells | hsa-miR-155-5p | MIMAT0000646 | 23108656 |
| Endothelial Cells | hsa-miR-155-5p | MIMAT0000646 | 19783678 |
| Endothelial Cells | hsa-miR-155-5p | MIMAT0000646 | 21310411 |
| Endothelial Cells | hsa-miR-16-5p | MIMAT0000069 | 21885851 |
| Endothelial Cells | hsa-miR-17-5p | MIMAT0000070 | 20299512 |
| Endothelial Cells | hsa-miR-181a-5p | MIMAT0000256 | 20558617 |
| Endothelial Cells | hsa-miR-18a-5p | MIMAT0000072 | 20299512 |
| Endothelial Cells | hsa-miR-195-5p | MIMAT0000461 | 20952681 |
| Endothelial Cells | hsa-miR-199a-3p | MIMAT0000232 | 21807947 |
| Endothelial Cells | hsa-miR-199a-5p | MIMAT0000231 | 23760629 |
| Endothelial Cells | hsa-miR-199a-5p | MIMAT0000231 | 19783678 |
| Endothelial Cells | hsa-miR-19a-3p | MIMAT0000073 | 20133739 |
| Endothelial Cells | hsa-miR-19a-3p | MIMAT0000073 | 20299512 |
| Endothelial Cells | hsa-miR-20a-5p | MIMAT0000075 | 20299512 |
| Endothelial Cells | hsa-miR-21-5p | MIMAT0000076 | 23313253 |
| Endothelial Cells | hsa-miR-21-5p | MIMAT0000076 | 21347332 |
| Endothelial Cells | hsa-miR-21-5p | MIMAT0000076 | 23496142 |
| Endothelial Cells | hsa-miR-210-3p | MIMAT0000267 | 19826008 |
| Endothelial Cells | hsa-miR-210-3p | MIMAT0000267 | 23322395 |
| Endothelial Cells | hsa-miR-210-3p | MIMAT0000267 | 18417479 |
| Endothelial Cells | hsa-miR-210-3p | MIMAT0000267 | 19808020 |
| Endothelial Cells | hsa-miR-214-3p | MIMAT0000271 | 22227154 |
| Endothelial Cells | hsa-miR-216a-5p | MIMAT0000273 | 19786632 |
| Endothelial Cells | hsa-miR-216a-5p | MIMAT0000273 | 21149267 |
| Endothelial Cells | hsa-miR-217 | MIMAT0000274 | 19786632 |
| Endothelial Cells | hsa-miR-221-3p | MIMAT0000278 | 20516212 |
| Endothelial Cells | hsa-miR-222-3p | MIMAT0000279 | 20489169 |
| Endothelial Cells | hsa-miR-23b-3p | MIMAT0000418 | 20133741 |
| Endothelial Cells | hsa-miR-296-5p | MIMAT0000690 | 18977327 |
| Endothelial Cells | hsa-miR-29b-3p | MIMAT0000100 | 21793034 |
| Endothelial Cells | hsa-miR-31-5p | MIMAT0000089 | 23233723 |
| Endothelial Cells | hsa-miR-330-3p | MIMAT0000751 | 21149267 |
| Endothelial Cells | hsa-miR-34a-5p | MIMAT0000255 | 20627091 |
| Endothelial Cells | hsa-miR-409-3p | MIMAT0001639 | 22531314 |
| Endothelial Cells | hsa-miR-424-5p | MIMAT0001341 | 20972335 |
| Endothelial Cells | hsa-miR-424-5p | MIMAT0001341 | 21885851 |
| Endothelial Cells | hsa-miR-503-5p | MIMAT0002874 | 21220732 |
| Endothelial Cells | hsa-miR-519c-3p | MIMAT0002832 | 20233879 |
| Endothelial Cells | hsa-miR-608 | MIMAT0003276 | 21149267 |
| Endothelial Cells | hsa-miR-92a-3p | MIMAT0000092 | 19460962 |
| Endothelial Cells | hsa-miR-93-5p | MIMAT0000093 | 20956944 |
| Endothelial Cells | mmu-miR-100-3p | MIMAT0017051 | 21339483 |
| Endothelial Cells | mmu-miR-100-5p | MIMAT0000655 | 21339483 |
| Endothelial Cells | mmu-miR-126a-3p | MIMAT0000138 | 18694565 |
| Endothelial Cells | mmu-miR-15a-5p | MIMAT0000526 | 20445066 |
| Endothelial Cells | mmu-miR-29c-3p | MIMAT0000536 | 21310958 |
| Endothelial Cells | mmu-miR-34a-5p | MIMAT0000542 | 20424141 |
| Endothelial Cells | rno-miR-320-3p | MIMAT0000903 | 18986336 |
| Endothelium | hsa-miR-10a-5p | MIMAT0000253 | 20624982 |
| Endothelium | hsa-miR-424-5p | MIMAT0001341 | 20972335 |
| Enterocytes | hsa-miR-510-5p | MIMAT0002882 | 18614545 |
| Enterocytes | hsa-miR-626 | MIMAT0003295 | 19892711 |
| Enterocytes | hsa-miR-7-5p | MIMAT0000252 | 19892711 |
| Enterocytes | mmu-miR-706 | MIMAT0003496 | 19892711 |
| Epidermis | hsa-miR-146a-5p | MIMAT0000449 | 20375304 |
| Epidermis | hsa-miR-203a | MIMAT0000264 | 18483491 |
| Epidermis | hsa-miR-31-5p | MIMAT0000089 | 23233723 |
| Epidermis | mmu-let-7a-5p | MIMAT0000521 | 19898466 |
| Epidermis | mmu-let-7e-5p | MIMAT0000524 | 19898466 |
| Epidermis | mmu-miR-125a-5p | MIMAT0000135 | 19898466 |
| Epidermis | mmu-miR-125b-5p | MIMAT0000136 | 19898466 |
| Epidermis | mmu-miR-128-3p | MIMAT0000140 | 19898466 |
| Epididymis | rno-miR-200c-3p | MIMAT0000873 | 20705680 |
| Epididymis | rno-miR-335 | MIMAT0000575 | 20933506 |
| Epithelial Cells | hsa-let-7d-5p | MIMAT0000065 | 20395557 |
| Epithelial Cells | hsa-miR-106a-5p | MIMAT0000103 | 20889678 |
| Epithelial Cells | hsa-miR-106b-5p | MIMAT0000680 | 20101223 |
| Epithelial Cells | hsa-miR-1226-3p | MIMAT0005577 | 20514397 |
| Epithelial Cells | hsa-miR-1258 | MIMAT0005909 | 21266359 |
| Epithelial Cells | hsa-miR-126-3p | MIMAT0000445 | 20083669 |
| Epithelial Cells | hsa-miR-128-3p | MIMAT0000424 | 20388705 |
| Epithelial Cells | hsa-miR-133a-3p | MIMAT0000427 | 18464261 |
| Epithelial Cells | hsa-miR-133b | MIMAT0000770 | 18464261 |
| Epithelial Cells | hsa-miR-141-3p | MIMAT0000432 | 19854497 |
| Epithelial Cells | hsa-miR-141-3p | MIMAT0000432 | 18835392 |
| Epithelial Cells | hsa-miR-141-3p | MIMAT0000432 | 18411277 |
| Epithelial Cells | hsa-miR-146a-5p | MIMAT0000449 | 20101223 |
| Epithelial Cells | hsa-miR-146a-5p | MIMAT0000449 | 20124483 |
| Epithelial Cells | hsa-miR-146a-5p | MIMAT0000449 | 20542134 |
| Epithelial Cells | hsa-miR-146b-5p | MIMAT0002809 | 20101223 |
| Epithelial Cells | hsa-miR-155-5p | MIMAT0000646 | 18794355 |
| Epithelial Cells | hsa-miR-15a-5p | MIMAT0000068 | 18949056 |
| Epithelial Cells | hsa-miR-184 | MIMAT0000454 | 19033458 |
| Epithelial Cells | hsa-miR-192-5p | MIMAT0000222 | 18835392 |
| Epithelial Cells | hsa-miR-197-3p | MIMAT0000227 | 19671678 |
| Epithelial Cells | hsa-miR-200a-3p | MIMAT0000682 | 18829540 |
| Epithelial Cells | hsa-miR-200a-3p | MIMAT0000682 | 18411277 |
| Epithelial Cells | hsa-miR-200a-3p | MIMAT0000682 | 18835392 |
| Epithelial Cells | hsa-miR-200a-3p | MIMAT0000682 | 19854497 |
| Epithelial Cells | hsa-miR-200b-3p | MIMAT0000318 | 18829540 |
| Epithelial Cells | hsa-miR-200b-3p | MIMAT0000318 | 18411277 |
| Epithelial Cells | hsa-miR-200b-3p | MIMAT0000318 | 19854497 |
| Epithelial Cells | hsa-miR-200c-3p | MIMAT0000617 | 18411277 |
| Epithelial Cells | hsa-miR-200c-3p | MIMAT0000617 | 19435871 |
| Epithelial Cells | hsa-miR-200c-3p | MIMAT0000617 | 19854497 |
| Epithelial Cells | hsa-miR-203a | MIMAT0000264 | 18483491 |
| Epithelial Cells | hsa-miR-203a | MIMAT0000264 | 22101077 |
| Epithelial Cells | hsa-miR-205-5p | MIMAT0000266 | 19033458 |
| Epithelial Cells | hsa-miR-21-5p | MIMAT0000076 | 23292313 |
| Epithelial Cells | hsa-miR-21-5p | MIMAT0000076 | 19473551 |
| Epithelial Cells | hsa-miR-21-5p | MIMAT0000076 | 21047769 |
| Epithelial Cells | hsa-miR-21-5p | MIMAT0000076 | 19435867 |
| Epithelial Cells | hsa-miR-212-3p | MIMAT0000269 | 18162065 |
| Epithelial Cells | hsa-miR-217 | MIMAT0000274 | 18835392 |
| Epithelial Cells | hsa-miR-218-5p | MIMAT0000275 | 19168627 |
| Epithelial Cells | hsa-miR-221-3p | MIMAT0000278 | 21236259 |
| Epithelial Cells | hsa-miR-27b-3p | MIMAT0000419 | 18835392 |
| Epithelial Cells | hsa-miR-27b-3p | MIMAT0000419 | 20388705 |
| Epithelial Cells | hsa-miR-302a-3p | MIMAT0000684 | 20101223 |
| Epithelial Cells | hsa-miR-330-3p | MIMAT0000751 | 19597470 |
| Epithelial Cells | hsa-miR-346 | MIMAT0000773 | 22002058 |
| Epithelial Cells | hsa-miR-429 | MIMAT0001536 | 18411277 |
| Epithelial Cells | hsa-miR-429 | MIMAT0001536 | 19854497 |
| Epithelial Cells | hsa-miR-429 | MIMAT0001536 | 18829540 |
| Epithelial Cells | hsa-miR-451a | MIMAT0001631 | 19318487 |
| Epithelial Cells | hsa-miR-483-3p | MIMAT0002173 | 22101077 |
| Epithelial Cells | hsa-miR-497-5p | MIMAT0002820 | 23453369 |
| Epithelial Cells | hsa-miR-513a-5p | MIMAT0002877 | 19155478 |
| Epithelial Cells | hsa-miR-532-5p | MIMAT0002888 | 18835392 |
| Epithelial Cells | hsa-miR-595 | MIMAT0003263 | 22101077 |
| Epithelial Cells | hsa-miR-603 | MIMAT0003271 | 18835392 |
| Epithelial Cells | hsa-miR-622 | MIMAT0003291 | 22016468 |
| Epithelial Cells | hsa-miR-7-5p | MIMAT0000252 | 19033458 |
| Epithelial Cells | hsa-miR-769-5p | MIMAT0003886 | 18835392 |
| Epithelial Cells | hsa-miR-92b-3p | MIMAT0003218 | 21030610 |
| Epithelial Cells | hsa-miR-93-5p | MIMAT0000093 | 19671678 |
| Epithelial Cells | hsa-miR-96-5p | MIMAT0000095 | 21203424 |
| Epithelial Cells | hsa-miR-98-5p | MIMAT0000096 | 19671678 |
| Epithelial Cells | hsa-miR-98-5p | MIMAT0000096 | 20486857 |
| Epithelial Cells | mmu-miR-128-3p | MIMAT0000140 | 20388705 |
| Epithelial Cells | mmu-miR-141-3p | MIMAT0000153 | 18411277 |
| Epithelial Cells | mmu-miR-155-5p | MIMAT0000165 | 21807897 |
| Epithelial Cells | mmu-miR-155-5p | MIMAT0000165 | 18794355 |
| Epithelial Cells | mmu-miR-17-5p | MIMAT0000649 | 17765889 |
| Epithelial Cells | mmu-miR-200a-3p | MIMAT0000519 | 18411277 |
| Epithelial Cells | mmu-miR-200b-3p | MIMAT0000233 | 18411277 |
| Epithelial Cells | mmu-miR-27b-3p | MIMAT0000126 | 20388705 |
| Epithelial Cells | mmu-miR-429-3p | MIMAT0001537 | 18411277 |
| Epithelium | hsa-miR-101-3p | MIMAT0000099 | 19043531 |
| Epithelium | hsa-miR-125b-5p | MIMAT0000423 | 19378336 |
| Epithelium | hsa-miR-133a-3p | MIMAT0000427 | 19378336 |
| Epithelium | hsa-miR-141-3p | MIMAT0000432 | 20053927 |
| Epithelium | hsa-miR-143-3p | MIMAT0000435 | 19157460 |
| Epithelium | hsa-miR-145-5p | MIMAT0000437 | 19378336 |
| Epithelium | hsa-miR-146a-5p | MIMAT0000449 | 18174313 |
| Epithelium | hsa-miR-155-5p | MIMAT0000646 | 19701459 |
| Epithelium | hsa-miR-182-5p | MIMAT0000259 | 17597072 |
| Epithelium | hsa-miR-195-5p | MIMAT0000461 | 19378336 |
| Epithelium | hsa-miR-199a-3p | MIMAT0000232 | 19378336 |
| Epithelium | hsa-miR-203a | MIMAT0000264 | 18483491 |
| Epithelium | hsa-miR-204-5p | MIMAT0000265 | 20056717 |
| Epithelium | hsa-miR-21-5p | MIMAT0000076 | 20346171 |
| Epithelium | hsa-miR-21-5p | MIMAT0000076 | 19473551 |
| Epithelium | hsa-miR-21-5p | MIMAT0000076 | 20056717 |
| Epithelium | hsa-miR-218-5p | MIMAT0000275 | 19890957 |
| Epithelium | hsa-miR-218-5p | MIMAT0000275 | 19168627 |
| Epithelium | hsa-miR-29a-3p | MIMAT0000086 | 18390668 |
| Epithelium | hsa-miR-29c-3p | MIMAT0000681 | 18390668 |
| Epithelium | hsa-miR-30a-3p | MIMAT0000088 | 19378336 |
| Epithelium | hsa-miR-30a-5p | MIMAT0000087 | 19378336 |
| Epithelium | hsa-miR-510-5p | MIMAT0002882 | 18614545 |
| Epithelium | hsa-miR-96-5p | MIMAT0000095 | 17597072 |
| Epithelium | mmu-miR-106b-5p | MIMAT0000386 | 19559694 |
| Epithelium | mmu-miR-155-5p | MIMAT0000165 | 19701459 |
| Epithelium | mmu-miR-17-5p | MIMAT0000649 | 17765889 |
| Epithelium | mmu-miR-17-5p | MIMAT0000649 | 19559694 |
| Epithelium | mmu-miR-20a-5p | MIMAT0000529 | 19559694 |
| Epithelium | mmu-miR-21a-5p | MIMAT0000530 | 21295561 |
| Erythroblasts | hsa-miR-223-3p | MIMAT0000280 | 20826802 |
| Erythroblasts | hsa-miR-223-3p | MIMAT0000280 | 19278969 |
| Erythroblasts | hsa-miR-25-3p | MIMAT0000081 | 20826802 |
| Erythroblasts | mmu-miR-223-3p | MIMAT0000665 | 20826802 |
| Erythroblasts | mmu-miR-25-3p | MIMAT0000652 | 20826802 |
| Erythrocytes | hsa-let-7a-5p | MIMAT0000062 | 19939273 |
| Erythrocytes | hsa-let-7c-3p | MIMAT0026472 | 19939273 |
| Erythrocytes | hsa-let-7c-5p | MIMAT0000064 | 19939273 |
| Erythrocytes | hsa-let-7d-3p | MIMAT0004484 | 19939273 |
| Erythrocytes | hsa-let-7d-5p | MIMAT0000065 | 19939273 |
| Erythrocytes | hsa-let-7e-3p | MIMAT0004485 | 19939273 |
| Erythrocytes | hsa-let-7e-5p | MIMAT0000066 | 19939273 |
| Erythrocytes | hsa-let-7g-3p | MIMAT0004584 | 19939273 |
| Erythrocytes | hsa-let-7g-5p | MIMAT0000414 | 19939273 |
| Erythrocytes | hsa-let-7i-3p | MIMAT0004585 | 19939273 |
| Erythrocytes | hsa-let-7i-5p | MIMAT0000415 | 19939273 |
| Erythrocytes | hsa-miR-320a | MIMAT0000510 | 18523662 |
| Erythroid Cells | hsa-let-7a-5p | MIMAT0000062 | 19939273 |
| Erythroid Cells | hsa-let-7c-3p | MIMAT0026472 | 19939273 |
| Erythroid Cells | hsa-let-7c-5p | MIMAT0000064 | 19939273 |
| Erythroid Cells | hsa-let-7d-3p | MIMAT0004484 | 19939273 |
| Erythroid Cells | hsa-let-7d-5p | MIMAT0000065 | 19939273 |
| Erythroid Cells | hsa-let-7d-5p | MIMAT0000065 | 20410187 |
| Erythroid Cells | hsa-let-7e-3p | MIMAT0004485 | 19939273 |
| Erythroid Cells | hsa-let-7e-5p | MIMAT0000066 | 19939273 |
| Erythroid Cells | hsa-let-7g-3p | MIMAT0004584 | 19939273 |
| Erythroid Cells | hsa-let-7g-5p | MIMAT0000414 | 19939273 |
| Erythroid Cells | hsa-let-7i-3p | MIMAT0004585 | 19939273 |
| Erythroid Cells | hsa-let-7i-5p | MIMAT0000415 | 19939273 |
| Erythroid Cells | hsa-miR-150-5p | MIMAT0000451 | 18539114 |
| Erythroid Cells | hsa-miR-223-3p | MIMAT0000280 | 19278969 |
| Erythroid Cells | hsa-miR-223-3p | MIMAT0000280 | 19017354 |
| Erythroid Precursor Cells | hsa-miR-15a-5p | MIMAT0000068 | 21205891 |
| Erythroid Precursor Cells | hsa-miR-16-5p | MIMAT0000069 | 21205891 |
| Esophagus | hsa-miR-196a-5p | MIMAT0000226 | 19342367 |
| Esophagus | hsa-miR-21-5p | MIMAT0000076 | 18372920 |
| Esophagus | mmu-miR-21a-5p | MIMAT0000530 | 18372920 |
| Eukaryotic Cells | hsa-let-7a-5p | MIMAT0000062 | 19939273 |
| Eukaryotic Cells | hsa-let-7c-3p | MIMAT0026472 | 19939273 |
| Eukaryotic Cells | hsa-let-7c-5p | MIMAT0000064 | 19939273 |
| Eukaryotic Cells | hsa-let-7d-3p | MIMAT0004484 | 19939273 |
| Eukaryotic Cells | hsa-let-7d-5p | MIMAT0000065 | 19939273 |
| Eukaryotic Cells | hsa-let-7e-3p | MIMAT0004485 | 19939273 |
| Eukaryotic Cells | hsa-let-7e-5p | MIMAT0000066 | 19939273 |
| Eukaryotic Cells | hsa-let-7g-3p | MIMAT0004584 | 19939273 |
| Eukaryotic Cells | hsa-let-7g-5p | MIMAT0000414 | 19939273 |
| Eukaryotic Cells | hsa-let-7i-3p | MIMAT0004585 | 19939273 |
| Eukaryotic Cells | hsa-let-7i-5p | MIMAT0000415 | 19939273 |
| Extracellular Matrix | bta-miR-335 | MIMAT0009291 | 18185580 |
| Extracellular Matrix | cfa-miR-335 | MIMAT0006624 | 18185580 |
| Extracellular Matrix | hsa-miR-124-3p | MIMAT0000422 | 21112327 |
| Extracellular Matrix | hsa-miR-125b-5p | MIMAT0000423 | 21703189 |
| Extracellular Matrix | hsa-miR-155-5p | MIMAT0000646 | 19701459 |
| Extracellular Matrix | hsa-miR-17-3p | MIMAT0000071 | 19771525 |
| Extracellular Matrix | hsa-miR-17-5p | MIMAT0000070 | 19771525 |
| Extracellular Matrix | hsa-miR-205-5p | MIMAT0000266 | 22578566 |
| Extracellular Matrix | hsa-miR-25-3p | MIMAT0000081 | 19541842 |
| Extracellular Matrix | hsa-miR-29a-3p | MIMAT0000086 | 18390668 |
| Extracellular Matrix | hsa-miR-29a-3p | MIMAT0000086 | 21665270 |
| Extracellular Matrix | hsa-miR-29b-3p | MIMAT0000100 | 21665270 |
| Extracellular Matrix | hsa-miR-29b-3p | MIMAT0000100 | 19956414 |
| Extracellular Matrix | hsa-miR-29b-3p | MIMAT0000100 | 21793034 |
| Extracellular Matrix | hsa-miR-29c-3p | MIMAT0000681 | 18390668 |
| Extracellular Matrix | hsa-miR-29c-3p | MIMAT0000681 | 21436257 |
| Extracellular Matrix | hsa-miR-335-5p | MIMAT0000765 | 18185580 |
| Extracellular Matrix | hsa-miR-378a-3p | MIMAT0000732 | 19844573 |
| Extracellular Matrix | hsa-miR-626 | MIMAT0003295 | 19892711 |
| Extracellular Matrix | hsa-miR-7-5p | MIMAT0000252 | 19892711 |
| Extracellular Matrix | mmu-miR-125b-5p | MIMAT0000136 | 21945074 |
| Extracellular Matrix | mmu-miR-143-3p | MIMAT0000247 | 20489207 |
| Extracellular Matrix | mmu-miR-155-5p | MIMAT0000165 | 19701459 |
| Extracellular Matrix | mmu-miR-15a-5p | MIMAT0000526 | 21305018 |
| Extracellular Matrix | mmu-miR-192-5p | MIMAT0000517 | 17360662 |
| Extracellular Matrix | mmu-miR-215-5p | MIMAT0000904 | 17360662 |
| Extracellular Matrix | mmu-miR-216a-5p | MIMAT0000662 | 20713358 |
| Extracellular Matrix | mmu-miR-21a-5p | MIMAT0000530 | 21295561 |
| Extracellular Matrix | mmu-miR-27b-3p | MIMAT0000126 | 19342382 |
| Extracellular Matrix | mmu-miR-29a-3p | MIMAT0000535 | 21665270 |
| Extracellular Matrix | mmu-miR-29b-3p | MIMAT0000127 | 19342382 |
| Extracellular Matrix | mmu-miR-29b-3p | MIMAT0000127 | 21665270 |
| Extracellular Matrix | mmu-miR-29c-3p | MIMAT0000536 | 21310958 |
| Extracellular Matrix | mmu-miR-30a-5p | MIMAT0000128 | 21945074 |
| Extracellular Matrix | mmu-miR-30c-5p | MIMAT0000514 | 21945074 |
| Extracellular Matrix | mmu-miR-497-5p | MIMAT0003453 | 21305018 |
| Extracellular Matrix | mmu-miR-706 | MIMAT0003496 | 19892711 |
| Extracellular Matrix | ppy-miR-335 | MIMAT0015837 | 18185580 |
| Extracellular Matrix | ptr-miR-335 | MIMAT0008104 | 18185580 |
| Extracellular Matrix | rno-miR-150-5p | MIMAT0000853 | 19892940 |
| Extracellular Matrix | rno-miR-192-5p | MIMAT0000867 | 20393144 |
| Extracellular Matrix | rno-miR-194-5p | MIMAT0000869 | 19892940 |
| Extracellular Matrix | rno-miR-215 | MIMAT0003118 | 20393144 |
| Extracellular Matrix | rno-miR-335 | MIMAT0000575 | 18185580 |
| Extracellular Matrix | ssc-miR-335 | MIMAT0013955 | 18185580 |
| Extremities | hsa-miR-433-3p | MIMAT0001627 | 20181727 |
| Extremities | mmu-miR-137-3p | MIMAT0000149 | 21256124 |
| Extremities | mmu-miR-140-5p | MIMAT0000151 | 21872590 |
| Extremities | mmu-miR-140-5p | MIMAT0000151 | 16828749 |
| Extremities | mmu-miR-153-3p | MIMAT0000163 | 21256124 |
| Extremities | mmu-miR-363-3p | MIMAT0000708 | 21256124 |
| Extremities | rno-miR-138-5p | MIMAT0000844 | 20064393 |
| Eye | hsa-miR-1 | MIMAT0000416 | 21169019 |
| Eye | hsa-miR-204-5p | MIMAT0000265 | 20713703 |
| Eye | hsa-miR-29a-3p | MIMAT0000086 | 21169019 |
| Eye | mmu-miR-184-3p | MIMAT0000213 | 20795863 |
| Fallopian Tubes | hsa-miR-182-5p | MIMAT0000259 | 22322863 |
| Femoral Artery | mmu-miR-100-3p | MIMAT0017051 | 21339483 |
| Femoral Artery | mmu-miR-100-5p | MIMAT0000655 | 21339483 |
| Fetal Blood | hsa-let-7a-5p | MIMAT0000062 | 19939273 |
| Fetal Blood | hsa-let-7c-3p | MIMAT0026472 | 19939273 |
| Fetal Blood | hsa-let-7c-5p | MIMAT0000064 | 19939273 |
| Fetal Blood | hsa-let-7d-3p | MIMAT0004484 | 19939273 |
| Fetal Blood | hsa-let-7d-5p | MIMAT0000065 | 19939273 |
| Fetal Blood | hsa-let-7e-3p | MIMAT0004485 | 19939273 |
| Fetal Blood | hsa-let-7e-5p | MIMAT0000066 | 19939273 |
| Fetal Blood | hsa-let-7g-3p | MIMAT0004584 | 19939273 |
| Fetal Blood | hsa-let-7g-5p | MIMAT0000414 | 19939273 |
| Fetal Blood | hsa-let-7i-3p | MIMAT0004585 | 19939273 |
| Fetal Blood | hsa-let-7i-5p | MIMAT0000415 | 19939273 |
| Fetal Blood | hsa-miR-129-5p | MIMAT0000242 | 18189265 |
| Fetal Blood | hsa-miR-135b-5p | MIMAT0000758 | 19795981 |
| Fetal Blood | hsa-miR-148a-3p | MIMAT0000243 | 19435428 |
| Fetal Blood | hsa-miR-155-5p | MIMAT0000646 | 18950466 |
| Fetal Blood | hsa-miR-184 | MIMAT0000454 | 19286996 |
| Fetal Blood | hsa-miR-19b-3p | MIMAT0000074 | 19435428 |
| Fetal Blood | hsa-miR-20a-5p | MIMAT0000075 | 19435428 |
| Fetal Blood | hsa-miR-214-3p | MIMAT0000271 | 19435428 |
| Fetal Blood | hsa-miR-223-3p | MIMAT0000280 | 19278969 |
| Fetal Blood | hsa-miR-31-3p | MIMAT0004504 | 19408243 |
| Fetal Blood | hsa-miR-31-5p | MIMAT0000089 | 19408243 |
| Fetal Blood | hsa-miR-520h | MIMAT0002867 | 18189265 |
| Fetal Blood | hsa-miR-520h | MIMAT0002867 | 19435428 |
| Fetal Blood | hsa-miR-92a-3p | MIMAT0000092 | 19435428 |
| Fetus | hsa-miR-433-3p | MIMAT0001627 | 20181727 |
| Fibroblasts | bta-miR-155 | MIMAT0009241 | 20735984 |
| Fibroblasts | cfa-miR-155 | MIMAT0006671 | 20735984 |
| Fibroblasts | dre-miR-155 | MIMAT0001851 | 20735984 |
| Fibroblasts | gga-miR-155 | MIMAT0001106 | 20735984 |
| Fibroblasts | hsa-let-7a-5p | MIMAT0000062 | 20005451 |
| Fibroblasts | hsa-let-7b-3p | MIMAT0004482 | 19126550 |
| Fibroblasts | hsa-let-7b-5p | MIMAT0000063 | 19126550 |
| Fibroblasts | hsa-miR-125b-5p | MIMAT0000423 | 21412257 |
| Fibroblasts | hsa-miR-125b-5p | MIMAT0000423 | 19293287 |
| Fibroblasts | hsa-miR-140-5p | MIMAT0000431 | 23401231 |
| Fibroblasts | hsa-miR-141-3p | MIMAT0000432 | 19861690 |
| Fibroblasts | hsa-miR-146a-5p | MIMAT0000449 | 20061417 |
| Fibroblasts | hsa-miR-146a-5p | MIMAT0000449 | 18759964 |
| Fibroblasts | hsa-miR-146a-5p | MIMAT0000449 | 21968601 |
| Fibroblasts | hsa-miR-146b-5p | MIMAT0002809 | 21305051 |
| Fibroblasts | hsa-miR-155-5p | MIMAT0000646 | 21093163 |
| Fibroblasts | hsa-miR-155-5p | MIMAT0000646 | 20735984 |
| Fibroblasts | hsa-miR-155-5p | MIMAT0000646 | 19701459 |
| Fibroblasts | hsa-miR-155-5p | MIMAT0000646 | 16675453 |
| Fibroblasts | hsa-miR-155-5p | MIMAT0000646 | 19759154 |
| Fibroblasts | hsa-miR-155-5p | MIMAT0000646 | 17668390 |
| Fibroblasts | hsa-miR-15a-5p | MIMAT0000068 | 19823025 |
| Fibroblasts | hsa-miR-15b-5p | MIMAT0000417 | 19861690 |
| Fibroblasts | hsa-miR-16-5p | MIMAT0000069 | 21885851 |
| Fibroblasts | hsa-miR-17-5p | MIMAT0000070 | 19823025 |
| Fibroblasts | hsa-miR-183-5p | MIMAT0000261 | 19940135 |
| Fibroblasts | hsa-miR-199a-3p | MIMAT0000232 | 18456660 |
| Fibroblasts | hsa-miR-206 | MIMAT0000462 | 17030984 |
| Fibroblasts | hsa-miR-20a-5p | MIMAT0000075 | 19823025 |
| Fibroblasts | hsa-miR-21-5p | MIMAT0000076 | 21826097 |
| Fibroblasts | hsa-miR-21-5p | MIMAT0000076 | 19509156 |
| Fibroblasts | hsa-miR-21-5p | MIMAT0000076 | 19435867 |
| Fibroblasts | hsa-miR-21-5p | MIMAT0000076 | 20813833 |
| Fibroblasts | hsa-miR-22-3p | MIMAT0000077 | 22538858 |
| Fibroblasts | hsa-miR-223-3p | MIMAT0000280 | 21305051 |
| Fibroblasts | hsa-miR-223-3p | MIMAT0000280 | 20826802 |
| Fibroblasts | hsa-miR-23a-3p | MIMAT0000078 | 21750350 |
| Fibroblasts | hsa-miR-23b-3p | MIMAT0000418 | 19490101 |
| Fibroblasts | hsa-miR-24-3p | MIMAT0000080 | 19861690 |
| Fibroblasts | hsa-miR-24-3p | MIMAT0000080 | 18365017 |
| Fibroblasts | hsa-miR-25-3p | MIMAT0000081 | 19861690 |
| Fibroblasts | hsa-miR-25-3p | MIMAT0000081 | 20826802 |
| Fibroblasts | hsa-miR-29a-3p | MIMAT0000086 | 20201077 |
| Fibroblasts | hsa-miR-29b-3p | MIMAT0000100 | 20201077 |
| Fibroblasts | hsa-miR-29b-3p | MIMAT0000100 | 21305051 |
| Fibroblasts | hsa-miR-29c-3p | MIMAT0000681 | 21436257 |
| Fibroblasts | hsa-miR-29c-3p | MIMAT0000681 | 21305051 |
| Fibroblasts | hsa-miR-31-3p | MIMAT0004504 | 20980827 |
| Fibroblasts | hsa-miR-31-5p | MIMAT0000089 | 20980827 |
| Fibroblasts | hsa-miR-335-5p | MIMAT0000765 | 21164520 |
| Fibroblasts | hsa-miR-378a-3p | MIMAT0000732 | 21471220 |
| Fibroblasts | hsa-miR-424-5p | MIMAT0001341 | 21885851 |
| Fibroblasts | hsa-miR-433-3p | MIMAT0001627 | 20181727 |
| Fibroblasts | hsa-miR-483-3p | MIMAT0002173 | 21305051 |
| Fibroblasts | hsa-miR-505-3p | MIMAT0002876 | 20923760 |
| Fibroblasts | hsa-miR-574-5p | MIMAT0004795 | 21305051 |
| Fibroblasts | mml-miR-155 | MIMAT0006216 | 20735984 |
| Fibroblasts | mmu-miR-101b-3p | MIMAT0000616 | 19169275 |
| Fibroblasts | mmu-miR-130a-3p | MIMAT0000141 | 19582148 |
| Fibroblasts | mmu-miR-133a-3p | MIMAT0000145 | 19043405 |
| Fibroblasts | mmu-miR-135b-5p | MIMAT0000612 | 23440414 |
| Fibroblasts | mmu-miR-143-3p | MIMAT0000247 | 19578358 |
| Fibroblasts | mmu-miR-145a-5p | MIMAT0000157 | 19578358 |
| Fibroblasts | mmu-miR-155-5p | MIMAT0000165 | 19701459 |
| Fibroblasts | mmu-miR-196a-5p | MIMAT0000518 | 19169275 |
| Fibroblasts | mmu-miR-200a-3p | MIMAT0000519 | 21115742 |
| Fibroblasts | mmu-miR-200b-3p | MIMAT0000233 | 21115742 |
| Fibroblasts | mmu-miR-200c-3p | MIMAT0000657 | 21115742 |
| Fibroblasts | mmu-miR-206-3p | MIMAT0000239 | 17030984 |
| Fibroblasts | mmu-miR-206-3p | MIMAT0000239 | 19043405 |
| Fibroblasts | mmu-miR-21a-5p | MIMAT0000530 | 19043405 |
| Fibroblasts | mmu-miR-21a-5p | MIMAT0000530 | 19147652 |
| Fibroblasts | mmu-miR-223-3p | MIMAT0000665 | 20826802 |
| Fibroblasts | mmu-miR-25-3p | MIMAT0000652 | 20826802 |
| Fibroblasts | mmu-miR-28a-3p | MIMAT0004661 | 20923760 |
| Fibroblasts | mmu-miR-28a-5p | MIMAT0000653 | 20923760 |
| Fibroblasts | mmu-miR-429-3p | MIMAT0001537 | 21115742 |
| Fibroblasts | mmu-miR-505-3p | MIMAT0003513 | 20923760 |
| Fibroblasts | mmu-miR-505-5p | MIMAT0017259 | 20923760 |
| Fibroblasts | ppy-miR-155 | MIMAT0015777 | 20735984 |
| Fibroblasts | ptr-miR-155 | MIMAT0008048 | 20735984 |
| Fibroblasts | rno-miR-21-5p | MIMAT0000790 | 22565856 |
| Fibroblasts | xtr-miR-155 | MIMAT0003608 | 20735984 |
| Focal Adhesions | hsa-miR-10b-5p | MIMAT0000254 | 22573479 |
| Focal Adhesions | hsa-miR-126-3p | MIMAT0000445 | 19767772 |
| Focal Adhesions | hsa-miR-151a-5p | MIMAT0004697 | 20305651 |
| Focal Adhesions | hsa-miR-21-5p | MIMAT0000076 | 17681183 |
| Fourth Ventricle | mmu-miR-449a-5p | MIMAT0001542 | 19056356 |
| Ganglia | hsa-miR-18a-5p | MIMAT0000072 | 20080637 |
| Ganglia | hsa-miR-19a-3p | MIMAT0000073 | 20080637 |
| Ganglia Spinal | hsa-miR-145-5p | MIMAT0000437 | 21276775 |
| Ganglia Spinal | hsa-miR-214-3p | MIMAT0000271 | 21276775 |
| Ganglia Sympathetic | hsa-miR-18a-5p | MIMAT0000072 | 20080637 |
| Ganglia Sympathetic | hsa-miR-19a-3p | MIMAT0000073 | 20080637 |
| Gap Junctions | hsa-miR-21-5p | MIMAT0000076 | 18508928 |
| Gap Junctions | mmu-miR-206-3p | MIMAT0000239 | 19933329 |
| Gap Junctions | mmu-miR-21a-5p | MIMAT0000530 | 18508928 |
| Gastric Mucosa | hsa-miR-146a-5p | MIMAT0000449 | 20542134 |
| Gastric Mucosa | hsa-miR-155-5p | MIMAT0000646 | 19650740 |
| Gastric Mucosa | hsa-miR-218-5p | MIMAT0000275 | 19890957 |
| Gastric Mucosa | hsa-miR-222-3p | MIMAT0000279 | 22321642 |
| Gastric Mucosa | hsa-miR-223-3p | MIMAT0000280 | 22270966 |
| Gastric Mucosa | hsa-miR-34b-3p | MIMAT0004676 | 20924086 |
| Gastric Mucosa | hsa-miR-34c-5p | MIMAT0000686 | 20924086 |
| Gastrointestinal Tract | hsa-miR-17-5p | MIMAT0000070 | 20926598 |
| Gastrointestinal Tract | hsa-miR-20a-5p | MIMAT0000075 | 20926598 |
| Gastrointestinal Tract | hsa-miR-20b-5p | MIMAT0001413 | 20926598 |
| Gastrointestinal Tract | hsa-miR-30c-5p | MIMAT0000244 | 20926598 |
| Gastrointestinal Tract | hsa-miR-30e-5p | MIMAT0000692 | 20926598 |
| Germ Cells | hsa-miR-1 | MIMAT0000416 | 18155131 |
| Germ Cells | hsa-miR-206 | MIMAT0000462 | 18155131 |
| Germ Cells | hsa-miR-221-3p | MIMAT0000278 | 18155131 |
| Germ Cells | hsa-miR-302b-3p | MIMAT0000715 | 19342891 |
| Germ Cells | hsa-miR-372-3p | MIMAT0000724 | 16564011 |
| Germ Cells | hsa-miR-372-3p | MIMAT0000724 | 18155131 |
| Germ Cells | hsa-miR-373-3p | MIMAT0000726 | 16564011 |
| Germ Cells | hsa-miR-383-5p | MIMAT0000738 | 21368870 |
| Germ Cells | mmu-let-7a-5p | MIMAT0000521 | 19898466 |
| Germ Cells | mmu-let-7e-5p | MIMAT0000524 | 19898466 |
| Germ Cells | mmu-miR-125a-5p | MIMAT0000135 | 19898466 |
| Germ Cells | mmu-miR-125b-5p | MIMAT0000136 | 19898466 |
| Germ Cells | mmu-miR-128-3p | MIMAT0000140 | 19898466 |
| Germ Cells | mmu-miR-290a-3p | MIMAT0004572 | 19628328 |
| Germ Cells | mmu-miR-291a-3p | MIMAT0000368 | 19628328 |
| Germ Cells | mmu-miR-292-3p | MIMAT0000370 | 19628328 |
| Germ Cells | mmu-miR-293-3p | MIMAT0000371 | 19628328 |
| Germ Cells | mmu-miR-294-3p | MIMAT0000372 | 19628328 |
| Germ Cells | mmu-miR-295-3p | MIMAT0000373 | 19628328 |
| Germ Cells | mmu-miR-29b-3p | MIMAT0000127 | 19509302 |
| Germ Layers | hsa-miR-135b-5p | MIMAT0000758 | 19795981 |
| Germ Layers | hsa-miR-302a-3p | MIMAT0000684 | 21266536 |
| Germ Layers | hsa-miR-302a-3p | MIMAT0000684 | 19386261 |
| Germ Layers | hsa-miR-302d-3p | MIMAT0000718 | 21266536 |
| Germinal Center | hsa-miR-127-3p | MIMAT0000446 | 19530237 |
| Germinal Center | hsa-miR-155-5p | MIMAT0000646 | 19177201 |
| Germinal Center | mmu-miR-155-5p | MIMAT0000165 | 18055230 |
| Gonads | mmu-miR-29b-3p | MIMAT0000127 | 19509302 |
| Granulocyte Precursor Cells | hsa-miR-223-3p | MIMAT0000280 | 18278031 |
| Granulocyte Precursor Cells | mmu-miR-223-3p | MIMAT0000665 | 18278031 |
| Granulocyte Precursor Cells | mmu-miR-27a-3p | MIMAT0000537 | 19298589 |
| Granulocyte Precursor Cells | mmu-miR-27b-3p | MIMAT0000126 | 19298589 |
| Granulocytes | hsa-miR-146a-5p | MIMAT0000449 | 20375304 |
| Granulocytes | hsa-miR-148a-3p | MIMAT0000243 | 19435428 |
| Granulocytes | hsa-miR-19b-3p | MIMAT0000074 | 19435428 |
| Granulocytes | hsa-miR-20a-5p | MIMAT0000075 | 19435428 |
| Granulocytes | hsa-miR-214-3p | MIMAT0000271 | 19435428 |
| Granulocytes | hsa-miR-223-3p | MIMAT0000280 | 19017354 |
| Granulocytes | hsa-miR-223-3p | MIMAT0000280 | 18278031 |
| Granulocytes | hsa-miR-520h | MIMAT0002867 | 19435428 |
| Granulocytes | hsa-miR-92a-3p | MIMAT0000092 | 19435428 |
| Granulocytes | mmu-miR-223-3p | MIMAT0000665 | 18278031 |
| Granulocytes | mmu-miR-27a-3p | MIMAT0000537 | 19298589 |
| Granulocytes | mmu-miR-27b-3p | MIMAT0000126 | 19298589 |
| Granulosa Cells | hsa-miR-224-5p | MIMAT0000281 | 20118412 |
| Granulosa Cells | mmu-miR-503-5p | MIMAT0003188 | 19799966 |
| Granulosa Cells | rno-miR-125a-3p | MIMAT0004729 | 23045399 |
| Granulosa Cells | rno-miR-125a-5p | MIMAT0000829 | 23045399 |
| Granulosa Cells | rno-miR-455-5p | MIMAT0005316 | 23045399 |
| Growth Plate | mmu-miR-125b-5p | MIMAT0000136 | 21945074 |
| Growth Plate | mmu-miR-30a-5p | MIMAT0000128 | 21945074 |
| Growth Plate | mmu-miR-30c-5p | MIMAT0000514 | 21945074 |
| Hair | hsa-miR-199a-3p | MIMAT0000232 | 21807947 |
| Hair | hsa-miR-96-5p | MIMAT0000095 | 19363479 |
| Hair | mmu-miR-15a-5p | MIMAT0000526 | 19416898 |
| Hair | mmu-miR-31-5p | MIMAT0000538 | 20522784 |
| Hair | mmu-miR-96-5p | MIMAT0000541 | 19363478 |
| Hair Follicle | hsa-miR-199a-3p | MIMAT0000232 | 21807947 |
| Hair Follicle | mmu-miR-31-5p | MIMAT0000538 | 20522784 |
| Hand | hsa-let-7a-5p | MIMAT0000062 | 18679415 |
| Hand | hsa-let-7a-5p | MIMAT0000062 | 18758960 |
| Hand | hsa-miR-10a-5p | MIMAT0000253 | 20506192 |
| Hand | hsa-miR-125b-5p | MIMAT0000423 | 19570947 |
| Hand | hsa-miR-155-5p | MIMAT0000646 | 19538740 |
| Hand | hsa-miR-15a-5p | MIMAT0000068 | 17707831 |
| Hand | hsa-miR-16-5p | MIMAT0000069 | 17707831 |
| Hand | hsa-miR-17-5p | MIMAT0000070 | 18941111 |
| Hand | hsa-miR-18a-3p | MIMAT0002891 | 19372139 |
| Hand | hsa-miR-20a-5p | MIMAT0000075 | 18941111 |
| Hand | hsa-miR-21-5p | MIMAT0000076 | 21317927 |
| Hand | hsa-miR-29b-3p | MIMAT0000100 | 17707831 |
| Hand | hsa-miR-448 | MIMAT0001532 | 20798686 |
| Hand | hsa-miR-503-5p | MIMAT0002874 | 19538740 |
| Hand | hsa-miR-519c-3p | MIMAT0002832 | 19825807 |
| Hand | hsa-miR-520h | MIMAT0002867 | 19825807 |
| Hand | mmu-miR-100-3p | MIMAT0017051 | 20439489 |
| Hand | mmu-miR-100-5p | MIMAT0000655 | 20439489 |
| Hand | mmu-miR-137-3p | MIMAT0000149 | 20439489 |
| Hand | mmu-miR-137-5p | MIMAT0016986 | 20439489 |
| Hand | mmu-miR-195a-5p | MIMAT0000225 | 21622680 |
| Hand | mmu-miR-696 | MIMAT0003483 | 20086200 |
| Head | hsa-miR-101-3p | MIMAT0000099 | 19043531 |
| Head | hsa-miR-125a-5p | MIMAT0000443 | 19179615 |
| Head | hsa-miR-135b-5p | MIMAT0000758 | 23340180 |
| Head | hsa-miR-138-5p | MIMAT0000430 | 21770894 |
| Head | hsa-miR-15a-5p | MIMAT0000068 | 19117988 |
| Head | hsa-miR-181a-5p | MIMAT0000256 | 21274007 |
| Head | hsa-miR-188-5p | MIMAT0000457 | 19223510 |
| Head | hsa-miR-200c-3p | MIMAT0000617 | 21207483 |
| Head | hsa-miR-200c-3p | MIMAT0000617 | 19223510 |
| Head | hsa-miR-200c-3p | MIMAT0000617 | 21294122 |
| Head | hsa-miR-203a | MIMAT0000264 | 18483491 |
| Head | hsa-miR-204-5p | MIMAT0000265 | 20369013 |
| Head | hsa-miR-21-5p | MIMAT0000076 | 18372920 |
| Head | hsa-miR-30c-5p | MIMAT0000244 | 19223510 |
| Head | hsa-miR-30e-5p | MIMAT0000692 | 19223510 |
| Head | hsa-miR-31-3p | MIMAT0004504 | 20145132 |
| Head | hsa-miR-31-5p | MIMAT0000089 | 20145132 |
| Head | hsa-miR-34a-5p | MIMAT0000255 | 21294122 |
| Head | hsa-miR-34a-5p | MIMAT0000255 | 21240262 |
| Head | hsa-miR-374a-5p | MIMAT0000727 | 21274007 |
| Head | hsa-miR-489-3p | MIMAT0002805 | 20700123 |
| Head | hsa-miR-519a-3p | MIMAT0002869 | 21274007 |
| Head | hsa-miR-630 | MIMAT0003299 | 21274007 |
| Head | hsa-miR-98-5p | MIMAT0000096 | 17222355 |
| Head | mmu-miR-127-5p | MIMAT0004530 | 19878148 |
| Head | mmu-miR-204-5p | MIMAT0000237 | 20369013 |
| Head | mmu-miR-21a-5p | MIMAT0000530 | 18372920 |
| Head | mmu-miR-22-3p | MIMAT0000531 | 19878148 |
| Head | mmu-miR-27a-3p | MIMAT0000537 | 19878148 |
| Head | mmu-miR-29b-1-5p | MIMAT0004523 | 19878148 |
| Head | mmu-miR-382-3p | MIMAT0004691 | 19878148 |
| Head | mmu-miR-411-3p | MIMAT0001093 | 19878148 |
| Head | mmu-miR-470-5p | MIMAT0002111 | 19878148 |
| Head | mmu-miR-501-3p | MIMAT0003509 | 19878148 |
| Head | mmu-miR-669b-5p | MIMAT0003476 | 19878148 |
| Head | mmu-miR-676-3p | MIMAT0003782 | 19878148 |
| Head | mmu-miR-96-5p | MIMAT0000541 | 19878148 |
| Heart | hsa-miR-1 | MIMAT0000416 | 19131648 |
| Heart | hsa-miR-1 | MIMAT0000416 | 17401374 |
| Heart | hsa-miR-1 | MIMAT0000416 | 19188439 |
| Heart | hsa-miR-1 | MIMAT0000416 | 20571053 |
| Heart | hsa-miR-1 | MIMAT0000416 | 20081117 |
| Heart | hsa-miR-1 | MIMAT0000416 | 15951802 |
| Heart | hsa-miR-1 | MIMAT0000416 | 17443681 |
| Heart | hsa-miR-1 | MIMAT0000416 | 23141496 |
| Heart | hsa-miR-1 | MIMAT0000416 | 21169019 |
| Heart | hsa-miR-126-3p | MIMAT0000445 | 20571053 |
| Heart | hsa-miR-133a-3p | MIMAT0000427 | 19720047 |
| Heart | hsa-miR-133a-3p | MIMAT0000427 | 17443681 |
| Heart | hsa-miR-133a-3p | MIMAT0000427 | 23069713 |
| Heart | hsa-miR-133b | MIMAT0000770 | 19720047 |
| Heart | hsa-miR-150-5p | MIMAT0000451 | 23211718 |
| Heart | hsa-miR-155-5p | MIMAT0000646 | 19897480 |
| Heart | hsa-miR-182-5p | MIMAT0000259 | 17597072 |
| Heart | hsa-miR-199b-5p | MIMAT0000263 | 21102440 |
| Heart | hsa-miR-208a-3p | MIMAT0000241 | 17379774 |
| Heart | hsa-miR-21-5p | MIMAT0000076 | 23313253 |
| Heart | hsa-miR-21-5p | MIMAT0000076 | 20219857 |
| Heart | hsa-miR-22-3p | MIMAT0000077 | 22538858 |
| Heart | hsa-miR-223-3p | MIMAT0000280 | 20080987 |
| Heart | hsa-miR-27a-3p | MIMAT0000084 | 21149577 |
| Heart | hsa-miR-29a-3p | MIMAT0000086 | 21169019 |
| Heart | hsa-miR-320a | MIMAT0000510 | 19380620 |
| Heart | hsa-miR-34a-5p | MIMAT0000255 | 20627091 |
| Heart | hsa-miR-499a-5p | MIMAT0002870 | 20081117 |
| Heart | hsa-miR-499b-5p | MIMAT0019897 | 20081117 |
| Heart | hsa-miR-802 | MIMAT0004185 | 19897480 |
| Heart | hsa-miR-9-5p | MIMAT0000441 | 19188439 |
| Heart | hsa-miR-96-5p | MIMAT0000095 | 17597072 |
| Heart | mmu-miR-122-5p | MIMAT0000246 | 16258535 |
| Heart | mmu-miR-133a-3p | MIMAT0000145 | 17468766 |
| Heart | mmu-miR-133a-3p | MIMAT0000145 | 19043405 |
| Heart | mmu-miR-138-5p | MIMAT0000150 | 19004786 |
| Heart | mmu-miR-15b-5p | MIMAT0000124 | 20007690 |
| Heart | mmu-miR-16-5p | MIMAT0000527 | 20007690 |
| Heart | mmu-miR-195a-5p | MIMAT0000225 | 20007690 |
| Heart | mmu-miR-195a-5p | MIMAT0000225 | 21622680 |
| Heart | mmu-miR-199b-3p | MIMAT0004667 | 21102440 |
| Heart | mmu-miR-1a-3p | MIMAT0000123 | 17234972 |
| Heart | mmu-miR-1a-3p | MIMAT0000123 | 19188439 |
| Heart | mmu-miR-1a-3p | MIMAT0000123 | 19521018 |
| Heart | mmu-miR-1a-3p | MIMAT0000123 | 19933931 |
| Heart | mmu-miR-1a-3p | MIMAT0000123 | 15951802 |
| Heart | mmu-miR-1a-3p | MIMAT0000123 | 17397913 |
| Heart | mmu-miR-1a-3p | MIMAT0000123 | 23436819 |
| Heart | mmu-miR-206-3p | MIMAT0000239 | 19043405 |
| Heart | mmu-miR-208a-3p | MIMAT0000520 | 17379774 |
| Heart | mmu-miR-21a-5p | MIMAT0000530 | 19147652 |
| Heart | mmu-miR-21a-5p | MIMAT0000530 | 20404348 |
| Heart | mmu-miR-21a-5p | MIMAT0000530 | 19043405 |
| Heart | mmu-miR-27b-3p | MIMAT0000126 | 20736237 |
| Heart | mmu-miR-320-3p | MIMAT0000666 | 19380620 |
| Heart | mmu-miR-322-5p | MIMAT0000548 | 20007690 |
| Heart | mmu-miR-494-3p | MIMAT0003182 | 20837890 |
| Heart | rno-miR-1-3p | MIMAT0003125 | 17401374 |
| Heart | rno-miR-1-3p | MIMAT0003125 | 19188439 |
| Heart | rno-miR-1-3p | MIMAT0003125 | 17516552 |
| Heart | rno-miR-1-3p | MIMAT0003125 | 23436819 |
| Heart | rno-miR-133a-3p | MIMAT0000839 | 17516552 |
| Heart | rno-miR-133a-3p | MIMAT0000839 | 19720047 |
| Heart | rno-miR-133b-3p | MIMAT0003126 | 19720047 |
| Heart | rno-miR-15b-5p | MIMAT0000784 | 20007690 |
| Heart | rno-miR-16-5p | MIMAT0000785 | 20007690 |
| Heart | rno-miR-195-5p | MIMAT0000870 | 20007690 |
| Heart | rno-miR-21-5p | MIMAT0000790 | 19336275 |
| Heart | rno-miR-214-3p | MIMAT0000885 | 20007690 |
| Heart | rno-miR-23a-3p | MIMAT0000792 | 19574461 |
| Heart | rno-miR-27a-3p | MIMAT0000799 | 19574461 |
| Heart | rno-miR-27a-3p | MIMAT0000799 | 21149577 |
| Heart | rno-miR-29a-3p | MIMAT0000802 | 20164119 |
| Heart | rno-miR-29c-3p | MIMAT0000803 | 20164119 |
| Heart | rno-miR-322-5p | MIMAT0001619 | 20007690 |
| Heart | rno-miR-328a-3p | MIMAT0000564 | 21098446 |
| Heart Ventricles | hsa-miR-1 | MIMAT0000416 | 20571053 |
| Heart Ventricles | hsa-miR-126-3p | MIMAT0000445 | 20571053 |
| Heart Ventricles | rno-miR-21-5p | MIMAT0000790 | 19706597 |
| Hematopoietic Stem Cells | hsa-let-7d-5p | MIMAT0000065 | 20410187 |
| Hematopoietic Stem Cells | hsa-miR-125a-5p | MIMAT0000443 | 20616003 |
| Hematopoietic Stem Cells | hsa-miR-126-3p | MIMAT0000445 | 18474618 |
| Hematopoietic Stem Cells | hsa-miR-129-5p | MIMAT0000242 | 18189265 |
| Hematopoietic Stem Cells | hsa-miR-145-5p | MIMAT0000437 | 18474618 |
| Hematopoietic Stem Cells | hsa-miR-148a-3p | MIMAT0000243 | 19435428 |
| Hematopoietic Stem Cells | hsa-miR-155-5p | MIMAT0000646 | 18299402 |
| Hematopoietic Stem Cells | hsa-miR-19b-3p | MIMAT0000074 | 19435428 |
| Hematopoietic Stem Cells | hsa-miR-20a-5p | MIMAT0000075 | 19435428 |
| Hematopoietic Stem Cells | hsa-miR-214-3p | MIMAT0000271 | 19435428 |
| Hematopoietic Stem Cells | hsa-miR-223-3p | MIMAT0000280 | 19278969 |
| Hematopoietic Stem Cells | hsa-miR-24-3p | MIMAT0000080 | 17906079 |
| Hematopoietic Stem Cells | hsa-miR-520h | MIMAT0002867 | 18189265 |
| Hematopoietic Stem Cells | hsa-miR-520h | MIMAT0002867 | 19435428 |
| Hematopoietic Stem Cells | hsa-miR-92a-3p | MIMAT0000092 | 19435428 |
| Hematopoietic Stem Cells | mmu-let-7a-5p | MIMAT0000521 | 18474618 |
| Hematopoietic Stem Cells | mmu-miR-125b-5p | MIMAT0000136 | 21118986 |
| Hematopoietic Stem Cells | mmu-miR-126a-3p | MIMAT0000138 | 18474618 |
| Hematopoietic Stem Cells | mmu-miR-145a-5p | MIMAT0000157 | 18474618 |
| Hematopoietic System | hsa-miR-124-3p | MIMAT0000422 | 18451139 |
| Hematopoietic System | hsa-miR-155-5p | MIMAT0000646 | 19359473 |
| Hepatic Stellate Cells | hsa-miR-143-3p | MIMAT0000435 | 19913496 |
| Hepatic Stellate Cells | hsa-miR-218-5p | MIMAT0000275 | 19913496 |
| Hepatic Stellate Cells | hsa-miR-29b-3p | MIMAT0000100 | 19913496 |
| Hepatic Stellate Cells | mmu-miR-132-3p | MIMAT0000144 | 19843474 |
| Hepatic Stellate Cells | rno-miR-132-3p | MIMAT0000838 | 19843474 |
| Hepatic Stellate Cells | rno-miR-146a-5p | MIMAT0000852 | 22735812 |
| Hepatic Stellate Cells | rno-miR-150-5p | MIMAT0000853 | 19892940 |
| Hepatic Stellate Cells | rno-miR-15b-5p | MIMAT0000784 | 19232449 |
| Hepatic Stellate Cells | rno-miR-16-5p | MIMAT0000785 | 19232449 |
| Hepatic Stellate Cells | rno-miR-194-5p | MIMAT0000869 | 19892940 |
| Hepatic Stellate Cells | rno-miR-200a-3p | MIMAT0000874 | 19185571 |
| Hepatic Stellate Cells | rno-miR-27a-3p | MIMAT0000799 | 19185571 |
| Hepatic Stellate Cells | rno-miR-27b-3p | MIMAT0000798 | 19185571 |
| Hepatocytes | hsa-let-7c-5p | MIMAT0000064 | 20347499 |
| Hepatocytes | hsa-let-7g-5p | MIMAT0000414 | 20347499 |
| Hepatocytes | hsa-miR-103a-3p | MIMAT0000101 | 22723340 |
| Hepatocytes | hsa-miR-107 | MIMAT0000104 | 22723340 |
| Hepatocytes | hsa-miR-122-5p | MIMAT0000421 | 20351063 |
| Hepatocytes | hsa-miR-122-5p | MIMAT0000421 | 23055569 |
| Hepatocytes | hsa-miR-122-5p | MIMAT0000421 | 23221562 |
| Hepatocytes | hsa-miR-122-5p | MIMAT0000421 | 19726678 |
| Hepatocytes | hsa-miR-122-5p | MIMAT0000421 | 20842632 |
| Hepatocytes | hsa-miR-181a-5p | MIMAT0000256 | 22476949 |
| Hepatocytes | hsa-miR-181b-5p | MIMAT0000257 | 20023698 |
| Hepatocytes | hsa-miR-185-5p | MIMAT0000455 | 23459944 |
| Hepatocytes | hsa-miR-193b-3p | MIMAT0002819 | 20103677 |
| Hepatocytes | hsa-miR-196a-5p | MIMAT0000226 | 20127796 |
| Hepatocytes | hsa-miR-21-5p | MIMAT0000076 | 20827319 |
| Hepatocytes | hsa-miR-21-5p | MIMAT0000076 | 19072831 |
| Hepatocytes | hsa-miR-21-5p | MIMAT0000076 | 17681183 |
| Hepatocytes | hsa-miR-223-3p | MIMAT0000280 | 23459944 |
| Hepatocytes | hsa-miR-296-5p | MIMAT0000690 | 21633093 |
| Hepatocytes | hsa-miR-30a-5p | MIMAT0000087 | 19185580 |
| Hepatocytes | hsa-miR-33a-5p | MIMAT0000091 | 23547260 |
| Hepatocytes | hsa-miR-422a | MIMAT0001339 | 20351063 |
| Hepatocytes | hsa-miR-96-5p | MIMAT0000095 | 23459944 |
| Hepatocytes | mmu-miR-181b-5p | MIMAT0000673 | 20023698 |
| Hepatocytes | mmu-miR-194-5p | MIMAT0000224 | 21887698 |
| Hepatocytes | mmu-miR-21a-5p | MIMAT0000530 | 20432256 |
| Hepatocytes | mmu-miR-23b-3p | MIMAT0000125 | 19582816 |
| Hepatocytes | mmu-miR-24-3p | MIMAT0000219 | 19582816 |
| Hepatocytes | mmu-miR-27b-3p | MIMAT0000126 | 19582816 |
| Hepatocytes | mmu-miR-30a-5p | MIMAT0000128 | 19185580 |
| Hepatocytes | mmu-miR-378a-3p | MIMAT0003151 | 20432256 |
| Hepatocytes | mmu-miR-378a-5p | MIMAT0000742 | 20432256 |
| Hippocampus | hsa-miR-141-3p | MIMAT0000432 | 20584986 |
| Hippocampus | hsa-miR-21-5p | MIMAT0000076 | 20584986 |
| Hippocampus | hsa-miR-210-3p | MIMAT0000267 | 18539147 |
| Hippocampus | hsa-miR-375 | MIMAT0000728 | 20584986 |
| Hippocampus | mmu-miR-135a-5p | MIMAT0000147 | 20619502 |
| Hippocampus | mmu-miR-141-3p | MIMAT0000153 | 20584986 |
| Hippocampus | mmu-miR-16-5p | MIMAT0000527 | 20619502 |
| Hippocampus | mmu-miR-20a-5p | MIMAT0000529 | 20619502 |
| Hippocampus | mmu-miR-210-3p | MIMAT0000658 | 18539147 |
| Hippocampus | mmu-miR-298-5p | MIMAT0000376 | 18986979 |
| Hippocampus | mmu-miR-328-3p | MIMAT0000565 | 18986979 |
| Hippocampus | mmu-miR-375-3p | MIMAT0000739 | 20584986 |
| Hippocampus | rno-miR-141-3p | MIMAT0000846 | 20584986 |
| Hippocampus | rno-miR-21-5p | MIMAT0000790 | 20584986 |
| Hippocampus | rno-miR-21-5p | MIMAT0000790 | 21154462 |
| Hypothalamus | mmu-miR-7b-5p | MIMAT0000678 | 17028171 |
| Iliac Artery | rno-miR-21-5p | MIMAT0000790 | 22565856 |
| Immune System | hsa-miR-106a-5p | MIMAT0000103 | 19307576 |
| Immune System | hsa-miR-146a-5p | MIMAT0000449 | 20375304 |
| Immune System | hsa-miR-148a-3p | MIMAT0000243 | 19435428 |
| Immune System | hsa-miR-155-3p | MIMAT0004658 | 20852130 |
| Immune System | hsa-miR-155-5p | MIMAT0000646 | 20219467 |
| Immune System | hsa-miR-155-5p | MIMAT0000646 | 18299402 |
| Immune System | hsa-miR-155-5p | MIMAT0000646 | 21097505 |
| Immune System | hsa-miR-155-5p | MIMAT0000646 | 20852130 |
| Immune System | hsa-miR-155-5p | MIMAT0000646 | 19596814 |
| Immune System | hsa-miR-155-5p | MIMAT0000646 | 21030878 |
| Immune System | hsa-miR-155-5p | MIMAT0000646 | 20209161 |
| Immune System | hsa-miR-19b-3p | MIMAT0000074 | 19435428 |
| Immune System | hsa-miR-20a-5p | MIMAT0000075 | 19435428 |
| Immune System | hsa-miR-214-3p | MIMAT0000271 | 19435428 |
| Immune System | hsa-miR-520h | MIMAT0002867 | 19435428 |
| Immune System | hsa-miR-92a-3p | MIMAT0000092 | 19435428 |
| Immune System | mmu-miR-124-3p | MIMAT0000134 | 21131957 |
| Immune System | mmu-miR-146a-5p | MIMAT0000158 | 18791161 |
| Immune System | mmu-miR-155-5p | MIMAT0000165 | 18055230 |
| Immune System | mmu-miR-155-5p | MIMAT0000165 | 21385848 |
| Immune System | mmu-miR-155-5p | MIMAT0000165 | 17463290 |
| Induced Pluripotent Stem | hsa-miR-302a-3p | MIMAT0000684 | 23185040 |
| Cells | | | |
| Induced Pluripotent Stem | hsa-miR-302a-3p | MIMAT0000684 | 21062975 |
| Cells | | | |
| Induced Pluripotent Stem | hsa-miR-302b-3p | MIMAT0000715 | 23185040 |
| Cells | | | |
| Induced Pluripotent Stem | hsa-miR-302b-3p | MIMAT0000715 | 21062975 |
| Cells | | | |
| Induced Pluripotent Stem | hsa-miR-302c-3p | MIMAT0000717 | 23185040 |
| Cells | | | |
| Induced Pluripotent Stem | hsa-miR-302c-3p | MIMAT0000717 | 21062975 |
| Cells | | | |
| Induced Pluripotent Stem | hsa-miR-302d-3p | MIMAT0000718 | 23185040 |
| Cells | | | |
| Induced Pluripotent Stem | hsa-miR-302d-3p | MIMAT0000718 | 21062975 |
| Cells | | | |
| Induced Pluripotent Stem | mmu-let-7c-5p | MIMAT0000523 | 20054295 |
| Cells | | | |
| Induced Pluripotent Stem | mmu-miR-106b-5p | MIMAT0000386 | 21285944 |
| Cells | | | |
| Induced Pluripotent Stem | mmu-miR-93-5p | MIMAT0000540 | 21285944 |
| Cells | | | |
| Insulin-Secreting Cells | hsa-miR-9-5p | MIMAT0000441 | 16831872 |
| Insulin-Secreting Cells | mmu-miR-375-3p | MIMAT0000739 | 20224724 |
| Insulin-Secreting Cells | mmu-miR-9-5p | MIMAT0000142 | 21288303 |
| Insulin-Secreting Cells | rno-miR-9a-5p | MIMAT0000781 | 16831872 |
| Intercellular Junctions | hsa-miR-1 | MIMAT0000416 | 23142026 |
| Intercellular Junctions | hsa-miR-203a | MIMAT0000264 | 22101077 |
| Intercellular Junctions | hsa-miR-483-3p | MIMAT0002173 | 22101077 |
| Intercellular Junctions | hsa-miR-595 | MIMAT0003263 | 22101077 |
| Intestinal Mucosa | hsa-miR-221-3p | MIMAT0000278 | 21236259 |
| Intestine Small | hsa-miR-34a-5p | MIMAT0000255 | 21240262 |
| Intestine Small | hsa-miR-92b-3p | MIMAT0003218 | 21030610 |
| Intestine Small | mmu-miR-194-5p | MIMAT0000224 | 21887698 |
| Intestines | hsa-miR-203a | MIMAT0000264 | 22101077 |
| Intestines | hsa-miR-483-3p | MIMAT0002173 | 22101077 |
| Intestines | hsa-miR-595 | MIMAT0003263 | 22101077 |
| Jejunum | hsa-miR-626 | MIMAT0003295 | 19892711 |
| Jejunum | hsa-miR-7-5p | MIMAT0000252 | 19892711 |
| Jejunum | mmu-miR-706 | MIMAT0003496 | 19892711 |
| Joints | hsa-miR-19a-3p | MIMAT0000073 | 22105995 |
| Joints | hsa-miR-19b-3p | MIMAT0000074 | 22105995 |
| Jurkat Cells | hsa-miR-143-3p | MIMAT0000435 | 19464056 |
| Jurkat Cells | hsa-miR-181c-5p | MIMAT0000258 | 21112091 |
| Jurkat Cells | hsa-miR-221-3p | MIMAT0000278 | 21236259 |
| Jurkat Cells | hsa-miR-27b-3p | MIMAT0000419 | 16982751 |
| Jurkat Cells | hsa-miR-513a-5p | MIMAT0002877 | 19155478 |
| Keratinocytes | hsa-miR-105-5p | MIMAT0000102 | 19509287 |
| Keratinocytes | hsa-miR-125b-5p | MIMAT0000423 | 21412257 |
| Keratinocytes | hsa-miR-181a-5p | MIMAT0000256 | 21167132 |
| Keratinocytes | hsa-miR-203a | MIMAT0000264 | 18483491 |
| Keratinocytes | hsa-miR-203a | MIMAT0000264 | 17622355 |
| Keratinocytes | hsa-miR-203a | MIMAT0000264 | 22917968 |
| Keratinocytes | hsa-miR-24-3p | MIMAT0000080 | 23553486 |
| Keratinocytes | hsa-miR-31-5p | MIMAT0000089 | 23553486 |
| Keratinocytes | hsa-miR-31-5p | MIMAT0000089 | 23233723 |
| Keratinocytes | mmu-miR-31-5p | MIMAT0000538 | 20522784 |
| Kidney | hsa-miR-141-3p | MIMAT0000432 | 18925646 |
| Kidney | hsa-miR-15a-5p | MIMAT0000068 | 18949056 |
| Kidney | hsa-miR-17-5p | MIMAT0000070 | 19821056 |
| Kidney | hsa-miR-200a-3p | MIMAT0000682 | 19910931 |
| Kidney | hsa-miR-200b-3p | MIMAT0000318 | 19910931 |
| Kidney | hsa-miR-21-5p | MIMAT0000076 | 23292313 |
| Kidney | hsa-miR-212-3p | MIMAT0000269 | 22880819 |
| Kidney | hsa-miR-224-5p | MIMAT0000281 | 20180642 |
| Kidney | hsa-miR-27a-3p | MIMAT0000084 | 19513126 |
| Kidney | hsa-miR-27b-3p | MIMAT0000419 | 19581388 |
| Kidney | hsa-miR-429 | MIMAT0001536 | 19910931 |
| Kidney | hsa-miR-450a-5p | MIMAT0001545 | 18230805 |
| Kidney | hsa-miR-562 | MIMAT0003226 | 19789318 |
| Kidney | mmu-miR-122-5p | MIMAT0000246 | 16258535 |
| Kidney | mmu-miR-192-5p | MIMAT0000517 | 17360662 |
| Kidney | mmu-miR-194-5p | MIMAT0000224 | 21887698 |
| Kidney | mmu-miR-215-5p | MIMAT0000904 | 17360662 |
| Kidney | mmu-miR-216a-5p | MIMAT0000662 | 20713358 |
| Kidney | mmu-miR-216a-5p | MIMAT0000662 | 19543271 |
| Kidney | mmu-miR-217-5p | MIMAT0000679 | 19543271 |
| Kidney | mmu-miR-298-5p | MIMAT0000376 | 19581388 |
| Kidney | mmu-miR-29c-3p | MIMAT0000536 | 21310958 |
| Kidney | mmu-miR-93-5p | MIMAT0000540 | 20501654 |
| Kidney | rno-let-7a-1-3p | MIMAT0017085 | 24885635 |
| Kidney | rno-let-7a-2-3p | MIMAT0017086 | 24885635 |
| Kidney | rno-let-7a-5p | MIMAT0000774 | 24885635 |
| Kidney | rno-let-7b-3p | MIMAT0004705 | 24885635 |
| Kidney | rno-let-7b-5p | MIMAT0000775 | 24885635 |
| Kidney | rno-let-7c-1-3p | MIMAT0017087 | 24885635 |
| Kidney | rno-let-7c-2-3p | MIMAT0017088 | 24885635 |
| Kidney | rno-let-7c-5p | MIMAT0000776 | 24885635 |
| Kidney | rno-let-7d-3p | MIMAT0000563 | 24885635 |
| Kidney | rno-let-7d-5p | MIMAT0000562 | 24885635 |
| Kidney | rno-let-7e-3p | MIMAT0004706 | 24885635 |
| Kidney | rno-let-7e-5p | MIMAT0000777 | 24885635 |
| Kidney | rno-let-7f-1-3p | MIMAT0017089 | 24885635 |
| Kidney | rno-let-7f-2-3p | MIMAT0017090 | 24885635 |
| Kidney | rno-let-7f-5p | MIMAT0000778 | 24885635 |
| Kidney | rno-let-7i-3p | MIMAT0004707 | 24885635 |
| Kidney | rno-let-7i-5p | MIMAT0000779 | 24885635 |
| Kidney | rno-miR-1-3p | MIMAT0003125 | 24885635 |
| Kidney | rno-miR-100-5p | MIMAT0000822 | 24885635 |
| Kidney | rno-miR-101a-3p | MIMAT0000823 | 24885635 |
| Kidney | rno-miR-101a-5p | MIMAT0004726 | 24885635 |
| Kidney | rno-miR-101b-3p | MIMAT0000615 | 24885635 |
| Kidney | rno-miR-101b-5p | MIMAT0017045 | 24885635 |
| Kidney | rno-miR-103-1-5p | MIMAT0017114 | 24885635 |
| Kidney | rno-miR-103-3p | MIMAT0000824 | 24885635 |
| Kidney | rno-miR-106b-3p | MIMAT0004727 | 24885635 |
| Kidney | rno-miR-106b-5p | MIMAT0000825 | 24885635 |
| Kidney | rno-miR-107-3p | MIMAT0000826 | 24885635 |
| Kidney | rno-miR-107-5p | MIMAT0017115 | 24885635 |
| Kidney | rno-miR-10a-3p | MIMAT0004709 | 24885635 |
| Kidney | rno-miR-10a-5p | MIMAT0000782 | 24885635 |
| Kidney | rno-miR-10b-3p | MIMAT0017092 | 24885635 |
| Kidney | rno-miR-10b-5p | MIMAT0000783 | 24885635 |
| Kidney | rno-miR-122-3p | MIMAT0017116 | 24885635 |
| Kidney | rno-miR-122-5p | MIMAT0000827 | 24885635 |
| Kidney | rno-miR-124-3p | MIMAT0000828 | 24885635 |
| Kidney | rno-miR-1249 | MIMAT0017892 | 24885635 |
| Kidney | rno-miR-125a-3p | MIMAT0004729 | 24885635 |
| Kidney | rno-miR-125a-5p | MIMAT0000829 | 24885635 |
| Kidney | rno-miR-125b-1-3p | MIMAT0004730 | 24885635 |
| Kidney | rno-miR-125b-2-3p | MIMAT0026467 | 24885635 |
| Kidney | rno-miR-125b-5p | MIMAT0000830 | 24885635 |
| Kidney | rno-miR-126a-3p | MIMAT0000832 | 24885635 |
| Kidney | rno-miR-126a-5p | MIMAT0000831 | 24885635 |
| Kidney | rno-miR-126a-5p | MIMAT0000831 | 19102782 |
| Kidney | rno-miR-126a-5p | MIMAT0000831 | 19102782 |
| Kidney | rno-miR-127-5p | MIMAT0017117 | 24885635 |
| Kidney | rno-miR-128-1-5p | MIMAT0017118 | 19102782 |
| Kidney | rno-miR-128-1-5p | MIMAT0017118 | 19102782 |
| Kidney | rno-miR-128-3p | MIMAT0000834 | 24885635 |
| Kidney | rno-miR-129-1-3p | MIMAT0017120 | 24885635 |
| Kidney | rno-miR-129-2-3p | MIMAT0000601 | 24885635 |
| Kidney | rno-miR-129-5p | MIMAT0000600 | 24885635 |
| Kidney | rno-miR-1306-3p | MIMAT0024852 | 24885635 |
| Kidney | rno-miR-1306-5p | MIMAT0024851 | 24885635 |
| Kidney | rno-miR-130a-3p | MIMAT0000836 | 24885635 |
| Kidney | rno-miR-130b-3p | MIMAT0000837 | 24885635 |
| Kidney | rno-miR-130b-5p | MIMAT0017122 | 24885635 |
| Kidney | rno-miR-132-3p | MIMAT0000838 | 24885635 |
| Kidney | rno-miR-132-5p | MIMAT0017123 | 23326503 |
| Kidney | rno-miR-132-5p | MIMAT0017123 | 24885635 |
| Kidney | rno-miR-133a-3p | MIMAT0000839 | 24885635 |
| Kidney | rno-miR-133b-3p | MIMAT0003126 | 24885635 |
| Kidney | rno-miR-134-3p | MIMAT0017125 | 24885635 |
| Kidney | rno-miR-134-5p | MIMAT0000840 | 24885635 |
| Kidney | rno-miR-135a-5p | MIMAT0000841 | 24885635 |
| Kidney | rno-miR-135b-3p | MIMAT0017043 | 24885635 |
| Kidney | rno-miR-135b-5p | MIMAT0000611 | 24885635 |
| Kidney | rno-miR-136-3p | MIMAT0004733 | 24885635 |
| Kidney | rno-miR-136-5p | MIMAT0000842 | 19102782 |
| Kidney | rno-miR-136-5p | MIMAT0000842 | 19102782 |
| Kidney | rno-miR-137-3p | MIMAT0000843 | 24885635 |
| Kidney | rno-miR-138-1-3p | MIMAT0004734 | 24885635 |
| Kidney | rno-miR-138-2-3p | MIMAT0017127 | 24885635 |
| Kidney | rno-miR-138-5p | MIMAT0000844 | 24885635 |
| Kidney | rno-miR-139-5p | MIMAT0000845 | 24885635 |
| Kidney | rno-miR-140-5p | MIMAT0000573 | 24885635 |
| Kidney | rno-miR-141-3p | MIMAT0000846 | 24885635 |
| Kidney | rno-miR-142-3p | MIMAT0000848 | 24885635 |
| Kidney | rno-miR-142-5p | MIMAT0000847 | 24885635 |
| Kidney | rno-miR-143-3p | MIMAT0000849 | 24885635 |
| Kidney | rno-miR-144-3p | MIMAT0000850 | 24885635 |
| Kidney | rno-miR-144-5p | MIMAT0017130 | 24885635 |
| Kidney | rno-miR-145-5p | MIMAT0000851 | 24885635 |
| Kidney | rno-miR-146a-5p | MIMAT0000852 | 24885635 |
| Kidney | rno-miR-146b-5p | MIMAT0005595 | 24885635 |
| Kidney | rno-miR-146b-5p | MIMAT0005595 | 23326503 |
| Kidney | rno-miR-147 | MIMAT0005297 | 19102782 |
| Kidney | rno-miR-147 | MIMAT0005297 | 24885635 |
| Kidney | rno-miR-147 | MIMAT0005297 | 19102782 |
| Kidney | rno-miR-148b-3p | MIMAT0000579 | 24885635 |
| Kidney | rno-miR-148b-5p | MIMAT0004645 | 24885635 |
| Kidney | rno-miR-150-3p | MIMAT0017133 | 24885635 |
| Kidney | rno-miR-150-5p | MIMAT0000853 | 24885635 |
| Kidney | rno-miR-151-3p | MIMAT0000614 | 24885635 |
| Kidney | rno-miR-151-5p | MIMAT0000613 | 24885635 |
| Kidney | rno-miR-152-3p | MIMAT0000854 | 24885635 |
| Kidney | rno-miR-152-5p | MIMAT0017134 | 24885635 |
| Kidney | rno-miR-153-3p | MIMAT0000855 | 24885635 |
| Kidney | rno-miR-154-3p | MIMAT0017136 | 24885635 |
| Kidney | rno-miR-154-5p | MIMAT0000856 | 24885635 |
| Kidney | rno-miR-15b-3p | MIMAT0017093 | 24885635 |
| Kidney | rno-miR-15b-5p | MIMAT0000784 | 24885635 |
| Kidney | rno-miR-16-3p | MIMAT0017094 | 24885635 |
| Kidney | rno-miR-16-5p | MIMAT0000785 | 24885635 |
| Kidney | rno-miR-17-1-3p | MIMAT0004710 | 24885635 |
| Kidney | rno-miR-17-2-3p | MIMAT0017295 | 24885635 |
| Kidney | rno-miR-17-5p | MIMAT0000786 | 24885635 |
| Kidney | rno-miR-181a-1-3p | MIMAT0000884 | 24885635 |
| Kidney | rno-miR-181a-2-3p | MIMAT0017138 | 24885635 |
| Kidney | rno-miR-181a-5p | MIMAT0000858 | 24885635 |
| Kidney | rno-miR-181b-2-3p | MIMAT0017140 | 24885635 |
| Kidney | rno-miR-181b-5p | MIMAT0000859 | 19102782 |
| Kidney | rno-miR-181b-5p | MIMAT0000859 | 19102782 |
| Kidney | rno-miR-181b-5p | MIMAT0000859 | 24885635 |
| Kidney | rno-miR-181d-5p | MIMAT0005299 | 24885635 |
| Kidney | rno-miR-182 | MIMAT0005300 | 24885635 |
| Kidney | rno-miR-183-5p | MIMAT0000860 | 24885635 |
| Kidney | rno-miR-1839-3p | MIMAT0024844 | 24885635 |
| Kidney | rno-miR-1839-5p | MIMAT0024843 | 24885635 |
| Kidney | rno-miR-1843-3p | MIMAT0024848 | 24885635 |
| Kidney | rno-miR-1843-5p | MIMAT0024847 | 24885635 |
| Kidney | rno-miR-185-5p | MIMAT0000862 | 24885635 |
| Kidney | rno-miR-186-3p | MIMAT0017143 | 24885635 |
| Kidney | rno-miR-186-5p | MIMAT0000863 | 24885635 |
| Kidney | rno-miR-187-3p | MIMAT0000864 | 24885635 |
| Kidney | rno-miR-188-5p | MIMAT0005301 | 24885635 |
| Kidney | rno-miR-18a-5p | MIMAT0000787 | 24885635 |
| Kidney | rno-miR-190a-3p | MIMAT0017145 | 24885635 |
| Kidney | rno-miR-190a-5p | MIMAT0000865 | 24885635 |
| Kidney | rno-miR-190b-5p | MIMAT0005302 | 24885635 |
| Kidney | rno-miR-191a-5p | MIMAT0000866 | 24885635 |
| Kidney | rno-miR-192-3p | MIMAT0017147 | 24885635 |
| Kidney | rno-miR-192-5p | MIMAT0000867 | 20393144 |
| Kidney | rno-miR-192-5p | MIMAT0000867 | 24885635 |
| Kidney | rno-miR-194-3p | MIMAT0017148 | 24885635 |
| Kidney | rno-miR-194-5p | MIMAT0000869 | 24885635 |
| Kidney | rno-miR-195-3p | MIMAT0017149 | 24885635 |
| Kidney | rno-miR-195-5p | MIMAT0000870 | 24885635 |
| Kidney | rno-miR-196a-3p | MIMAT0004737 | 24885635 |
| Kidney | rno-miR-196a-5p | MIMAT0000871 | 19102782 |
| Kidney | rno-miR-196a-5p | MIMAT0000871 | 19102782 |
| Kidney | rno-miR-196a-5p | MIMAT0000871 | 24885635 |
| Kidney | rno-miR-196b-5p | MIMAT0001082 | 24885635 |
| Kidney | rno-miR-196c-3p | MIMAT0017299 | 24885635 |
| Kidney | rno-miR-196c-5p | MIMAT0005303 | 24885635 |
| Kidney | rno-miR-199a-3p | MIMAT0004738 | 24885635 |
| Kidney | rno-miR-199a-5p | MIMAT0000872 | 24885635 |
| Kidney | rno-miR-199a-5p | MIMAT0000872 | 23326503 |
| Kidney | rno-miR-19a-3p | MIMAT0000789 | 24885635 |
| Kidney | rno-miR-19a-5p | MIMAT0017098 | 24885635 |
| Kidney | rno-miR-19b-1-5p | MIMAT0017096 | 24885635 |
| Kidney | rno-miR-19b-3p | MIMAT0000788 | 24885635 |
| Kidney | rno-miR-200a-3p | MIMAT0000874 | 24885635 |
| Kidney | rno-miR-200b-3p | MIMAT0000875 | 24885635 |
| Kidney | rno-miR-200b-5p | MIMAT0017152 | 24885635 |
| Kidney | rno-miR-200c-3p | MIMAT0000873 | 24885635 |
| Kidney | rno-miR-201-3p | MIMAT0017364 | 24885635 |
| Kidney | rno-miR-203a-3p | MIMAT0000876 | 24885635 |
| Kidney | rno-miR-203a-5p | MIMAT0017153 | 19102782 |
| Kidney | rno-miR-203a-5p | MIMAT0017153 | 19102782 |
| Kidney | rno-miR-203a-5p | MIMAT0017153 | 24885635 |
| Kidney | rno-miR-203b-3p | MIMAT0017800 | 24885635 |
| Kidney | rno-miR-203b-5p | MIMAT0017799 | 24885635 |
| Kidney | rno-miR-204-3p | MIMAT0004739 | 24885635 |
| Kidney | rno-miR-204-5p | MIMAT0000877 | 24885635 |
| Kidney | rno-miR-205 | MIMAT0000878 | 24885635 |
| Kidney | rno-miR-206-3p | MIMAT0000879 | 24885635 |
| Kidney | rno-miR-20a-3p | MIMAT0000603 | 24885635 |
| Kidney | rno-miR-20a-5p | MIMAT0000602 | 19102782 |
| Kidney | rno-miR-20a-5p | MIMAT0000602 | 19102782 |
| Kidney | rno-miR-20a-5p | MIMAT0000602 | 24885635 |
| Kidney | rno-miR-20b-5p | MIMAT0003211 | 24885635 |
| Kidney | rno-miR-21-3p | MIMAT0004711 | 24885635 |
| Kidney | rno-miR-21-5p | MIMAT0000790 | 24885635 |
| Kidney | rno-miR-21-5p | MIMAT0000790 | 23326503 |
| Kidney | rno-miR-21-5p | MIMAT0000790 | 19102782 |
| Kidney | rno-miR-21-5p | MIMAT0000790 | 19102782 |
| Kidney | rno-miR-210-3p | MIMAT0000881 | 24885635 |
| Kidney | rno-miR-211-5p | MIMAT0000882 | 24885635 |
| Kidney | rno-miR-212-3p | MIMAT0000883 | 24885635 |
| Kidney | rno-miR-212-5p | MIMAT0017158 | 24885635 |
| Kidney | rno-miR-214-3p | MIMAT0000885 | 24885635 |
| Kidney | rno-miR-214-5p | MIMAT0017159 | 23326503 |
| Kidney | rno-miR-215 | MIMAT0003118 | 20393144 |
| Kidney | rno-miR-215 | MIMAT0003118 | 24885635 |
| Kidney | rno-miR-216a-5p | MIMAT0000886 | 24885635 |
| Kidney | rno-miR-216a-5p | MIMAT0000886 | 19102782 |
| Kidney | rno-miR-216a-5p | MIMAT0000886 | 19102782 |
| Kidney | rno-miR-217-5p | MIMAT0000887 | 24885635 |
| Kidney | rno-miR-217-5p | MIMAT0000887 | 19102782 |
| Kidney | rno-miR-217-5p | MIMAT0000887 | 19102782 |
| Kidney | rno-miR-218a-5p | MIMAT0000888 | 24885635 |
| Kidney | rno-miR-218b | MIMAT0017838 | 24885635 |
| Kidney | rno-miR-22-3p | MIMAT0000791 | 24885635 |
| Kidney | rno-miR-22-5p | MIMAT0003152 | 24885635 |
| Kidney | rno-miR-221-3p | MIMAT0000890 | 24885635 |
| Kidney | rno-miR-221-5p | MIMAT0017163 | 24885635 |
| Kidney | rno-miR-222-3p | MIMAT0000891 | 24885635 |
| Kidney | rno-miR-222-5p | MIMAT0017164 | 24885635 |
| Kidney | rno-miR-223-3p | MIMAT0000892 | 24885635 |
| Kidney | rno-miR-223-5p | MIMAT0017165 | 24885635 |
| Kidney | rno-miR-23a-3p | MIMAT0000792 | 24885635 |
| Kidney | rno-miR-23a-5p | MIMAT0004712 | 24885635 |
| Kidney | rno-miR-23b-3p | MIMAT0000793 | 24885635 |
| Kidney | rno-miR-23b-5p | MIMAT0017099 | 24885635 |
| Kidney | rno-miR-24-1-5p | MIMAT0003153 | 24885635 |
| Kidney | rno-miR-24-2-5p | MIMAT0005441 | 24885635 |
| Kidney | rno-miR-24-3p | MIMAT0000794 | 24885635 |
| Kidney | rno-miR-25-3p | MIMAT0000795 | 24885635 |
| Kidney | rno-miR-25-3p | MIMAT0000795 | 21071935 |
| Kidney | rno-miR-26a-5p | MIMAT0000796 | 24885635 |
| Kidney | rno-miR-26b-3p | MIMAT0004714 | 24885635 |
| Kidney | rno-miR-26b-5p | MIMAT0000797 | 24885635 |
| Kidney | rno-miR-27a-3p | MIMAT0000799 | 24885635 |
| Kidney | rno-miR-27a-5p | MIMAT0004715 | 24885635 |
| Kidney | rno-miR-27b-3p | MIMAT0000798 | 24885635 |
| Kidney | rno-miR-27b-5p | MIMAT0017101 | 24885635 |
| Kidney | rno-miR-28-3p | MIMAT0004716 | 24885635 |
| Kidney | rno-miR-28-5p | MIMAT0000800 | 24885635 |
| Kidney | rno-miR-299a-3p | MIMAT0017167 | 24885635 |
| Kidney | rno-miR-299a-5p | MIMAT0000901 | 24885635 |
| Kidney | rno-miR-299b-5p | MIMAT0017833 | 24885635 |
| Kidney | rno-miR-29a-3p | MIMAT0000802 | 24885635 |
| Kidney | rno-miR-29a-5p | MIMAT0004718 | 24885635 |
| Kidney | rno-miR-29b-1-5p | MIMAT0005445 | 24885635 |
| Kidney | rno-miR-29b-2-5p | MIMAT0004717 | 24885635 |
| Kidney | rno-miR-29b-3p | MIMAT0000801 | 24885635 |
| Kidney | rno-miR-29c-3p | MIMAT0000803 | 24885635 |
| Kidney | rno-miR-29c-5p | MIMAT0003154 | 24885635 |
| Kidney | rno-miR-300-3p | MIMAT0000902 | 24885635 |
| Kidney | rno-miR-300-5p | MIMAT0004743 | 24885635 |
| Kidney | rno-miR-301a-3p | MIMAT0000552 | 24885635 |
| Kidney | rno-miR-301a-5p | MIMAT0017026 | 24885635 |
| Kidney | rno-miR-301b-3p | MIMAT0005304 | 24885635 |
| Kidney | rno-miR-3065-3p | MIMAT0017840 | 24885635 |
| Kidney | rno-miR-3065-5p | MIMAT0017839 | 24885635 |
| Kidney | rno-miR-3072 | MIMAT0025071 | 24885635 |
| Kidney | rno-miR-3075 | MIMAT0025057 | 24885635 |
| Kidney | rno-miR-30a-3p | MIMAT0000809 | 24885635 |
| Kidney | rno-miR-30a-5p | MIMAT0000808 | 24885635 |
| Kidney | rno-miR-30a-5p | MIMAT0000808 | 19102782 |
| Kidney | rno-miR-30a-5p | MIMAT0000808 | 19102782 |
| Kidney | rno-miR-30b-3p | MIMAT0004721 | 24885635 |
| Kidney | rno-miR-30b-5p | MIMAT0000806 | 24885635 |
| Kidney | rno-miR-30c-1-3p | MIMAT0004719 | 24885635 |
| Kidney | rno-miR-30c-2-3p | MIMAT0005442 | 24885635 |
| Kidney | rno-miR-30c-5p | MIMAT0000804 | 24885635 |
| Kidney | rno-miR-30d-3p | MIMAT0004722 | 24885635 |
| Kidney | rno-miR-30d-5p | MIMAT0000807 | 24885635 |
| Kidney | rno-miR-30e-3p | MIMAT0004720 | 24885635 |
| Kidney | rno-miR-30e-5p | MIMAT0000805 | 24885635 |
| Kidney | rno-miR-31a-3p | MIMAT0017102 | 24885635 |
| Kidney | rno-miR-31a-5p | MIMAT0000810 | 24885635 |
| Kidney | rno-miR-31a-5p | MIMAT0000810 | 19102782 |
| Kidney | rno-miR-31a-5p | MIMAT0000810 | 19102782 |
| Kidney | rno-miR-31a-5p | MIMAT0000810 | 23326503 |
| Kidney | rno-miR-32-5p | MIMAT0000811 | 24885635 |
| Kidney | rno-miR-320-3p | MIMAT0000903 | 24885635 |
| Kidney | rno-miR-322-3p | MIMAT0000547 | 24885635 |
| Kidney | rno-miR-322-5p | MIMAT0001619 | 24885635 |
| Kidney | rno-miR-323-3p | MIMAT0000550 | 24885635 |
| Kidney | rno-miR-324-3p | MIMAT0000554 | 24885635 |
| Kidney | rno-miR-324-5p | MIMAT0000553 | 24885635 |
| Kidney | rno-miR-326-3p | MIMAT0000560 | 24885635 |
| Kidney | rno-miR-328a-3p | MIMAT0000564 | 24885635 |
| Kidney | rno-miR-328b-3p | MIMAT0017904 | 24885635 |
| Kidney | rno-miR-329-3p | MIMAT0000566 | 24885635 |
| Kidney | rno-miR-329-5p | MIMAT0017031 | 24885635 |
| Kidney | rno-miR-33-3p | MIMAT0017104 | 24885635 |
| Kidney | rno-miR-33-5p | MIMAT0000812 | 24885635 |
| Kidney | rno-miR-330-3p | MIMAT0000568 | 24885635 |
| Kidney | rno-miR-330-5p | MIMAT0004641 | 24885635 |
| Kidney | rno-miR-331-3p | MIMAT0000570 | 24885635 |
| Kidney | rno-miR-335 | MIMAT0000575 | 24885635 |
| Kidney | rno-miR-335 | MIMAT0000575 | 19102782 |
| Kidney | rno-miR-335 | MIMAT0000575 | 19102782 |
| Kidney | rno-miR-336-5p | MIMAT0000576 | 24885635 |
| Kidney | rno-miR-338-3p | MIMAT0000581 | 24885635 |
| Kidney | rno-miR-339-3p | MIMAT0004648 | 24885635 |
| Kidney | rno-miR-339-5p | MIMAT0000583 | 24885635 |
| Kidney | rno-miR-340-3p | MIMAT0000585 | 24885635 |
| Kidney | rno-miR-340-5p | MIMAT0004650 | 24885635 |
| Kidney | rno-miR-341 | MIMAT0000587 | 24885635 |
| Kidney | rno-miR-342-3p | MIMAT0000589 | 24885635 |
| Kidney | rno-miR-342-5p | MIMAT0004652 | 24885635 |
| Kidney | rno-miR-345-3p | MIMAT0004655 | 24885635 |
| Kidney | rno-miR-345-5p | MIMAT0000594 | 24885635 |
| Kidney | rno-miR-346 | MIMAT0000596 | 19102782 |
| Kidney | rno-miR-346 | MIMAT0000596 | 19102782 |
| Kidney | rno-miR-3473 | MIMAT0024853 | 24885635 |
| Kidney | rno-miR-34a-3p | MIMAT0017106 | 24885635 |
| Kidney | rno-miR-34a-5p | MIMAT0000815 | 23326503 |
| Kidney | rno-miR-34a-5p | MIMAT0000815 | 24885635 |
| Kidney | rno-miR-34b-5p | MIMAT0000813 | 19102782 |
| Kidney | rno-miR-34b-5p | MIMAT0000813 | 19102782 |
| Kidney | rno-miR-350 | MIMAT0000604 | 24885635 |
| Kidney | rno-miR-351-3p | MIMAT0017041 | 24885635 |
| Kidney | rno-miR-351-5p | MIMAT0000608 | 24885635 |
| Kidney | rno-miR-352 | MIMAT0000610 | 24885635 |
| Kidney | rno-miR-3548 | MIMAT0017806 | 24885635 |
| Kidney | rno-miR-3553 | MIMAT0017814 | 24885635 |
| Kidney | rno-miR-3556a | MIMAT0017821 | 24885635 |
| Kidney | rno-miR-3556b | MIMAT0017818 | 24885635 |
| Kidney | rno-miR-3557-3p | MIMAT0017820 | 24885635 |
| Kidney | rno-miR-3557-5p | MIMAT0017819 | 24885635 |
| Kidney | rno-miR-3570 | MIMAT0017850 | 24885635 |
| Kidney | rno-miR-3571 | MIMAT0017851 | 24885635 |
| Kidney | rno-miR-3574 | MIMAT0017860 | 24885635 |
| Kidney | rno-miR-3583-5p | MIMAT0017873 | 24885635 |
| Kidney | rno-miR-3585-5p | MIMAT0017878 | 24885635 |
| Kidney | rno-miR-3586-3p | MIMAT0017881 | 24885635 |
| Kidney | rno-miR-3587 | MIMAT0017883 | 24885635 |
| Kidney | rno-miR-3588 | MIMAT0017887 | 24885635 |
| Kidney | rno-miR-3589 | MIMAT0017888 | 24885635 |
| Kidney | rno-miR-3590-3p | MIMAT0017890 | 24885635 |
| Kidney | rno-miR-3590-5p | MIMAT0017889 | 24885635 |
| Kidney | rno-miR-3591 | MIMAT0017893 | 24885635 |
| Kidney | rno-miR-3596a | MIMAT0017886 | 24885635 |
| Kidney | rno-miR-3596b | MIMAT0017871 | 24885635 |
| Kidney | rno-miR-3596c | MIMAT0017877 | 24885635 |
| Kidney | rno-miR-3596d | MIMAT0017823 | 24885635 |
| Kidney | rno-miR-361-5p | MIMAT0003117 | 24885635 |
| Kidney | rno-miR-362-3p | MIMAT0017357 | 24885635 |
| Kidney | rno-miR-362-5p | MIMAT0012828 | 24885635 |
| Kidney | rno-miR-369-3p | MIMAT0003207 | 24885635 |
| Kidney | rno-miR-374-3p | MIMAT0017223 | 24885635 |
| Kidney | rno-miR-374-5p | MIMAT0003208 | 24885635 |
| Kidney | rno-miR-375-3p | MIMAT0005307 | 24885635 |
| Kidney | rno-miR-376a-3p | MIMAT0003198 | 24885635 |
| Kidney | rno-miR-376b-3p | MIMAT0003196 | 24885635 |
| Kidney | rno-miR-376b-5p | MIMAT0003195 | 24885635 |
| Kidney | rno-miR-376c-3p | MIMAT0003194 | 24885635 |
| Kidney | rno-miR-376c-5p | MIMAT0017219 | 24885635 |
| Kidney | rno-miR-377-3p | MIMAT0003123 | 24885635 |
| Kidney | rno-miR-377-5p | MIMAT0017203 | 19102782 |
| Kidney | rno-miR-377-5p | MIMAT0017203 | 19102782 |
| Kidney | rno-miR-378a-3p | MIMAT0003379 | 24885635 |
| Kidney | rno-miR-378a-5p | MIMAT0003378 | 24885635 |
| Kidney | rno-miR-378b | MIMAT0024855 | 24885635 |
| Kidney | rno-miR-379-3p | MIMAT0004791 | 24885635 |
| Kidney | rno-miR-379-5p | MIMAT0003192 | 19102782 |
| Kidney | rno-miR-379-5p | MIMAT0003192 | 19102782 |
| Kidney | rno-miR-379-5p | MIMAT0003192 | 24885635 |
| Kidney | rno-miR-380-3p | MIMAT0017302 | 24885635 |
| Kidney | rno-miR-380-5p | MIMAT0005308 | 24885635 |
| Kidney | rno-miR-380-5p | MIMAT0005308 | 19102782 |
| Kidney | rno-miR-380-5p | MIMAT0005308 | 19102782 |
| Kidney | rno-miR-381-3p | MIMAT0003199 | 24885635 |
| Kidney | rno-miR-382-5p | MIMAT0003201 | 24885635 |
| Kidney | rno-miR-409a-5p | MIMAT0003204 | 24885635 |
| Kidney | rno-miR-410-3p | MIMAT0005311 | 24885635 |
| Kidney | rno-miR-411-3p | MIMAT0017304 | 24885635 |
| Kidney | rno-miR-411-5p | MIMAT0005312 | 24885635 |
| Kidney | rno-miR-412-5p | MIMAT0017204 | 24885635 |
| Kidney | rno-miR-423-3p | MIMAT0005313 | 24885635 |
| Kidney | rno-miR-423-5p | MIMAT0017305 | 24885635 |
| Kidney | rno-miR-425-3p | MIMAT0017306 | 24885635 |
| Kidney | rno-miR-425-5p | MIMAT0005314 | 24885635 |
| Kidney | rno-miR-429 | MIMAT0001538 | 24885635 |
| Kidney | rno-miR-433-3p | MIMAT0001628 | 24885635 |
| Kidney | rno-miR-434-3p | MIMAT0005315 | 24885635 |
| Kidney | rno-miR-434-5p | MIMAT0017307 | 24885635 |
| Kidney | rno-miR-448-5p | MIMAT0017177 | 19102782 |
| Kidney | rno-miR-448-5p | MIMAT0017177 | 19102782 |
| Kidney | rno-miR-449a-5p | MIMAT0001543 | 24885635 |
| Kidney | rno-miR-450a-3p | MIMAT0017183 | 24885635 |
| Kidney | rno-miR-450a-5p | MIMAT0001547 | 24885635 |
| Kidney | rno-miR-450a-5p | MIMAT0001547 | 18230805 |
| Kidney | rno-miR-451-5p | MIMAT0001633 | 24885635 |
| Kidney | rno-miR-455-3p | MIMAT0017308 | 24885635 |
| Kidney | rno-miR-455-5p | MIMAT0005316 | 24885635 |
| Kidney | rno-miR-466b-1-3p | MIMAT0017285 | 24885635 |
| Kidney | rno-miR-466b-2-3p | MIMAT0017286 | 24885635 |
| Kidney | rno-miR-484 | MIMAT0005319 | 24885635 |
| Kidney | rno-miR-485-3p | MIMAT0017222 | 24885635 |
| Kidney | rno-miR-485-5p | MIMAT0003203 | 24885635 |
| Kidney | rno-miR-487b-3p | MIMAT0003200 | 24885635 |
| Kidney | rno-miR-488-3p | MIMAT0005341 | 24885635 |
| Kidney | rno-miR-490-3p | MIMAT0012823 | 24885635 |
| Kidney | rno-miR-490-5p | MIMAT0017356 | 24885635 |
| Kidney | rno-miR-494-3p | MIMAT0003193 | 24885635 |
| Kidney | rno-miR-494-5p | MIMAT0017218 | 24885635 |
| Kidney | rno-miR-496-3p | MIMAT0012860 | 24885635 |
| Kidney | rno-miR-497-3p | MIMAT0017230 | 24885635 |
| Kidney | rno-miR-497-5p | MIMAT0003383 | 24885635 |
| Kidney | rno-miR-499-3p | MIMAT0017227 | 24885635 |
| Kidney | rno-miR-499-5p | MIMAT0003381 | 24885635 |
| Kidney | rno-miR-500-3p | MIMAT0005321 | 24885635 |
| Kidney | rno-miR-501-3p | MIMAT0017198 | 24885635 |
| Kidney | rno-miR-503-3p | MIMAT0017224 | 24885635 |
| Kidney | rno-miR-503-5p | MIMAT0003213 | 23326503 |
| Kidney | rno-miR-503-5p | MIMAT0003213 | 24885635 |
| Kidney | rno-miR-504 | MIMAT0012830 | 24885635 |
| Kidney | rno-miR-509-3p | MIMAT0024850 | 24885635 |
| Kidney | rno-miR-509-5p | MIMAT0024849 | 24885635 |
| Kidney | rno-miR-511-3p | MIMAT0017358 | 24885635 |
| Kidney | rno-miR-532-3p | MIMAT0005323 | 24885635 |
| Kidney | rno-miR-532-5p | MIMAT0005322 | 24885635 |
| Kidney | rno-miR-539-3p | MIMAT0017212 | 24885635 |
| Kidney | rno-miR-541-3p | MIMAT0017213 | 24885635 |
| Kidney | rno-miR-541-5p | MIMAT0003177 | 24885635 |
| Kidney | rno-miR-542-3p | MIMAT0003179 | 24885635 |
| Kidney | rno-miR-542-5p | MIMAT0003178 | 24885635 |
| Kidney | rno-miR-543-3p | MIMAT0003175 | 24885635 |
| Kidney | rno-miR-544-3p | MIMAT0012831 | 24885635 |
| Kidney | rno-miR-547-3p | MIMAT0012851 | 24885635 |
| Kidney | rno-miR-582-3p | MIMAT0017360 | 24885635 |
| Kidney | rno-miR-582-5p | MIMAT0012833 | 24885635 |
| Kidney | rno-miR-598-3p | MIMAT0005325 | 24885635 |
| Kidney | rno-miR-615 | MIMAT0012835 | 24885635 |
| Kidney | rno-miR-6215 | MIMAT0024854 | 24885635 |
| Kidney | rno-miR-6329 | MIMAT0025068 | 24885635 |
| Kidney | rno-miR-6333 | MIMAT0025074 | 24885635 |
| Kidney | rno-miR-652-3p | MIMAT0005342 | 24885635 |
| Kidney | rno-miR-653-5p | MIMAT0012838 | 24885635 |
| Kidney | rno-miR-668 | MIMAT0012839 | 24885635 |
| Kidney | rno-miR-672-5p | MIMAT0005327 | 24885635 |
| Kidney | rno-miR-674-3p | MIMAT0005330 | 24885635 |
| Kidney | rno-miR-674-5p | MIMAT0005329 | 24885635 |
| Kidney | rno-miR-708-3p | MIMAT0005332 | 24885635 |
| Kidney | rno-miR-708-5p | MIMAT0005331 | 24885635 |
| Kidney | rno-miR-7a-2-3p | MIMAT0017091 | 24885635 |
| Kidney | rno-miR-7a-5p | MIMAT0000606 | 24885635 |
| Kidney | rno-miR-7a-5p | MIMAT0000606 | 19102782 |
| Kidney | rno-miR-7a-5p | MIMAT0000606 | 19102782 |
| Kidney | rno-miR-7b | MIMAT0000780 | 24885635 |
| Kidney | rno-miR-7b | MIMAT0000780 | 19102782 |
| Kidney | rno-miR-7b | MIMAT0000780 | 19102782 |
| Kidney | rno-miR-802-3p | MIMAT0017362 | 24885635 |
| Kidney | rno-miR-802-5p | MIMAT0012840 | 24885635 |
| Kidney | rno-miR-872-3p | MIMAT0005283 | 24885635 |
| Kidney | rno-miR-872-5p | MIMAT0005282 | 24885635 |
| Kidney | rno-miR-874-3p | MIMAT0005284 | 24885635 |
| Kidney | rno-miR-874-5p | MIMAT0017290 | 24885635 |
| Kidney | rno-miR-877 | MIMAT0005285 | 24885635 |
| Kidney | rno-miR-92a-1-5p | MIMAT0017107 | 24885635 |
| Kidney | rno-miR-92a-3p | MIMAT0000816 | 24885635 |
| Kidney | rno-miR-92b-3p | MIMAT0005340 | 21071935 |
| Kidney | rno-miR-92b-3p | MIMAT0005340 | 24885635 |
| Kidney | rno-miR-93-5p | MIMAT0000817 | 24885635 |
| Kidney | rno-miR-96-5p | MIMAT0000818 | 19102782 |
| Kidney | rno-miR-96-5p | MIMAT0000818 | 19102782 |
| Kidney | rno-miR-96-5p | MIMAT0000818 | 24885635 |
| Kidney | rno-miR-98-5p | MIMAT0000819 | 24885635 |
| Kidney | rno-miR-99a-3p | MIMAT0004724 | 24885635 |
| Kidney | rno-miR-99a-5p | MIMAT0000820 | 24885635 |
| Kidney | rno-miR-99a-5p | MIMAT0000820 | 19102782 |
| Kidney | rno-miR-99a-5p | MIMAT0000820 | 19102782 |
| Kidney | rno-miR-99b-3p | MIMAT0004725 | 24885635 |
| Kidney | rno-miR-99b-5p | MIMAT0000821 | 24885635 |
| Kidney | rno-miR-9a-3p | MIMAT0004708 | 24885635 |
| Kidney | rno-miR-9a-5p | MIMAT0000781 | 24885635 |
| Kidney | rno-miR-9b-5p | MIMAT0017835 | 24885635 |
| Killer Cells Natural | hsa-miR-15a-5p | MIMAT0000068 | 22379033 |
| Killer Cells Natural | hsa-miR-15b-5p | MIMAT0000417 | 22379033 |
| Killer Cells Natural | hsa-miR-16-5p | MIMAT0000069 | 22379033 |
| Killer Cells Natural | hsa-miR-29a-3p | MIMAT0000086 | 19584290 |
| Killer Cells Natural | hsa-miR-30c-1-3p | MIMAT0004674 | 22320217 |
| Killer Cells Natural | hsa-miR-520b | MIMAT0002843 | 19109132 |
| Killer Cells Natural | mmu-miR-223-3p | MIMAT0000665 | 20935160 |
| Knee | hsa-miR-9-5p | MIMAT0000441 | 19008124 |
| Kupffer Cells | hsa-miR-155-5p | MIMAT0000646 | 19783678 |
| Kupffer Cells | hsa-miR-199a-5p | MIMAT0000231 | 19783678 |
| Langerhans Cells | hsa-miR-146a-5p | MIMAT0000449 | 20375304 |
| Leukocytes | hsa-miR-126-3p | MIMAT0000445 | 18227515 |
| Leukocytes | hsa-miR-146a-5p | MIMAT0000449 | 19333922 |
| Leukocytes | hsa-miR-155-5p | MIMAT0000646 | 21310411 |
| Leukocytes | hsa-miR-21-5p | MIMAT0000076 | 21069438 |
| Leukocytes | hsa-miR-31-5p | MIMAT0000089 | 23233723 |
| Leukocytes | hsa-miR-320a | MIMAT0000510 | 18523662 |
| Leukocytes | mmu-miR-223-3p | MIMAT0000665 | 22043014 |
| Limb Buds | mmu-miR-137-3p | MIMAT0000149 | 21256124 |
| Limb Buds | mmu-miR-140-5p | MIMAT0000151 | 21872590 |
| Limb Buds | mmu-miR-153-3p | MIMAT0000163 | 21256124 |
| Limb Buds | mmu-miR-363-3p | MIMAT0000708 | 21256124 |
| Liver | bta-miR-122 | MIMAT0003849 | 18073344 |
| Liver | bta-miR-29a | MIMAT0003518 | 17652184 |
| Liver | bta-miR-29c | MIMAT0003829 | 17652184 |
| Liver | cfa-miR-122 | MIMAT0006619 | 18073344 |
| Liver | cfa-miR-29a | MIMAT0006626 | 17652184 |
| Liver | cfa-miR-29c | MIMAT0006705 | 17652184 |
| Liver | dre-miR-122 | MIMAT0001818 | 18073344 |
| Liver | dre-miR-29a | MIMAT0001802 | 17652184 |
| Liver | hsa-let-7b-5p | MIMAT0000063 | 16971064 |
| Liver | hsa-let-7c-3p | MIMAT0026472 | 19841744 |
| Liver | hsa-let-7c-5p | MIMAT0000064 | 19841744 |
| Liver | hsa-miR-1 | MIMAT0000416 | 18593903 |
| Liver | hsa-miR-1 | MIMAT0000416 | 22963810 |
| Liver | hsa-miR-101-3p | MIMAT0000099 | 19133651 |
| Liver | hsa-miR-103a-3p | MIMAT0000101 | 22723340 |
| Liver | hsa-miR-107 | MIMAT0000104 | 22723340 |
| Liver | hsa-miR-107 | MIMAT0000104 | 21029372 |
| Liver | hsa-miR-10b-5p | MIMAT0000254 | 19780876 |
| Liver | hsa-miR-122-5p | MIMAT0000421 | 19296470 |
| Liver | hsa-miR-122-5p | MIMAT0000421 | 20351063 |
| Liver | hsa-miR-122-5p | MIMAT0000421 | 17179747 |
| Liver | hsa-miR-122-5p | MIMAT0000421 | 17616664 |
| Liver | hsa-miR-122-5p | MIMAT0000421 | 19617899 |
| Liver | hsa-miR-122-5p | MIMAT0000421 | 18073344 |
| Liver | hsa-miR-122-5p | MIMAT0000421 | 19726678 |
| Liver | hsa-miR-122-5p | MIMAT0000421 | 23348614 |
| Liver | hsa-miR-122-5p | MIMAT0000421 | 22276989 |
| Liver | hsa-miR-122-5p | MIMAT0000421 | 16459310 |
| Liver | hsa-miR-122-5p | MIMAT0000421 | 20842632 |
| Liver | hsa-miR-124-3p | MIMAT0000422 | 19843643 |
| Liver | hsa-miR-125a-5p | MIMAT0000443 | 21220473 |
| Liver | hsa-miR-125a-5p | MIMAT0000443 | 16331254 |
| Liver | hsa-miR-125b-5p | MIMAT0000423 | 20827722 |
| Liver | hsa-miR-125b-5p | MIMAT0000423 | 18649363 |
| Liver | hsa-miR-140-5p | MIMAT0000431 | 23401231 |
| Liver | hsa-miR-141-3p | MIMAT0000432 | 20005803 |
| Liver | hsa-miR-143-3p | MIMAT0000435 | 19913496 |
| Liver | hsa-miR-143-3p | MIMAT0000435 | 16966691 |
| Liver | hsa-miR-143-3p | MIMAT0000435 | 19472311 |
| Liver | hsa-miR-145-5p | MIMAT0000437 | 23499894 |
| Liver | hsa-miR-145-5p | MIMAT0000437 | 22431718 |
| Liver | hsa-miR-152-3p | MIMAT0000438 | 20578129 |
| Liver | hsa-miR-155-5p | MIMAT0000646 | 19783678 |
| Liver | hsa-miR-15a-5p | MIMAT0000068 | 18949056 |
| Liver | hsa-miR-181a-5p | MIMAT0000256 | 22476949 |
| Liver | hsa-miR-181a-5p | MIMAT0000256 | 19585654 |
| Liver | hsa-miR-181b-5p | MIMAT0000257 | 19585654 |
| Liver | hsa-miR-181b-5p | MIMAT0000257 | 20023698 |
| Liver | hsa-miR-181c-5p | MIMAT0000258 | 19585654 |
| Liver | hsa-miR-181d-5p | MIMAT0002821 | 19585654 |
| Liver | hsa-miR-182-5p | MIMAT0000259 | 19167416 |
| Liver | hsa-miR-182-5p | MIMAT0000259 | 19569050 |
| Liver | hsa-miR-183-5p | MIMAT0000261 | 20979053 |
| Liver | hsa-miR-183-5p | MIMAT0000261 | 20602797 |
| Liver | hsa-miR-185-5p | MIMAT0000455 | 23459944 |
| Liver | hsa-miR-186-5p | MIMAT0000456 | 20979053 |
| Liver | hsa-miR-18a-5p | MIMAT0000072 | 19167416 |
| Liver | hsa-miR-18a-5p | MIMAT0000072 | 16331254 |
| Liver | hsa-miR-191-5p | MIMAT0000440 | 20924108 |
| Liver | hsa-miR-193b-3p | MIMAT0002819 | 20655737 |
| Liver | hsa-miR-194-5p | MIMAT0000460 | 19569050 |
| Liver | hsa-miR-195-5p | MIMAT0000461 | 16331254 |
| Liver | hsa-miR-196a-5p | MIMAT0000226 | 20127796 |
| Liver | hsa-miR-199a-3p | MIMAT0000232 | 16331254 |
| Liver | hsa-miR-199a-3p | MIMAT0000232 | 0 |
| Liver | hsa-miR-199a-5p | MIMAT0000231 | 20799954 |
| Liver | hsa-miR-199a-5p | MIMAT0000231 | 16331254 |
| Liver | hsa-miR-199a-5p | MIMAT0000231 | 19783678 |
| Liver | hsa-miR-200a-3p | MIMAT0000682 | 19167416 |
| Liver | hsa-miR-200a-3p | MIMAT0000682 | 20005803 |
| Liver | hsa-miR-200a-3p | MIMAT0000682 | 16331254 |
| Liver | hsa-miR-200b-3p | MIMAT0000318 | 19167416 |
| Liver | hsa-miR-200b-3p | MIMAT0000318 | 20005803 |
| Liver | hsa-miR-200b-3p | MIMAT0000318 | 19569050 |
| Liver | hsa-miR-200c-3p | MIMAT0000617 | 19167416 |
| Liver | hsa-miR-200c-3p | MIMAT0000617 | 20005803 |
| Liver | hsa-miR-200c-3p | MIMAT0000617 | 19569050 |
| Liver | hsa-miR-203a | MIMAT0000264 | 19843643 |
| Liver | hsa-miR-21-5p | MIMAT0000076 | 20827319 |
| Liver | hsa-miR-21-5p | MIMAT0000076 | 16966691 |
| Liver | hsa-miR-21-5p | MIMAT0000076 | 19072831 |
| Liver | hsa-miR-21-5p | MIMAT0000076 | 19133651 |
| Liver | hsa-miR-21-5p | MIMAT0000076 | 19167416 |
| Liver | hsa-miR-21-5p | MIMAT0000076 | 20167875 |
| Liver | hsa-miR-212-3p | MIMAT0000269 | 18162065 |
| Liver | hsa-miR-216a-5p | MIMAT0000273 | 23471579 |
| Liver | hsa-miR-217 | MIMAT0000274 | 23471579 |
| Liver | hsa-miR-218-5p | MIMAT0000275 | 19913496 |
| Liver | hsa-miR-22-3p | MIMAT0000077 | 0 |
| Liver | hsa-miR-221-3p | MIMAT0000278 | 20018759 |
| Liver | hsa-miR-222-3p | MIMAT0000279 | 20018759 |
| Liver | hsa-miR-222-3p | MIMAT0000279 | 20103675 |
| Liver | hsa-miR-223-3p | MIMAT0000280 | 23459944 |
| Liver | hsa-miR-223-3p | MIMAT0000280 | 18555017 |
| Liver | hsa-miR-224-5p | MIMAT0000281 | 16331254 |
| Liver | hsa-miR-26a-5p | MIMAT0000082 | 19524505 |
| Liver | hsa-miR-26b-5p | MIMAT0000083 | 19569050 |
| Liver | hsa-miR-296-5p | MIMAT0000690 | 21633093 |
| Liver | hsa-miR-29a-3p | MIMAT0000086 | 20943204 |
| Liver | hsa-miR-29a-3p | MIMAT0000086 | 21175813 |
| Liver | hsa-miR-29b-3p | MIMAT0000100 | 19913496 |
| Liver | hsa-miR-30a-5p | MIMAT0000087 | 19185580 |
| Liver | hsa-miR-320a | MIMAT0000510 | 22134529 |
| Liver | hsa-miR-320a | MIMAT0000510 | 19070389 |
| Liver | hsa-miR-33a-5p | MIMAT0000091 | 20466885 |
| Liver | hsa-miR-34a-5p | MIMAT0000255 | 20185821 |
| Liver | hsa-miR-34a-5p | MIMAT0000255 | 21240262 |
| Liver | hsa-miR-34a-5p | MIMAT0000255 | 19167416 |
| Liver | hsa-miR-374a-5p | MIMAT0000727 | 19569050 |
| Liver | hsa-miR-375 | MIMAT0000728 | 20226166 |
| Liver | hsa-miR-422a | MIMAT0001339 | 20351063 |
| Liver | hsa-miR-429 | MIMAT0001536 | 19569050 |
| Liver | hsa-miR-429 | MIMAT0001536 | 20005803 |
| Liver | hsa-miR-483-3p | MIMAT0002173 | 20388800 |
| Liver | hsa-miR-499a-5p | MIMAT0002870 | 21934092 |
| Liver | hsa-miR-499b-5p | MIMAT0019897 | 21934092 |
| Liver | hsa-miR-513a-5p | MIMAT0002877 | 19155478 |
| Liver | hsa-miR-631 | MIMAT0003300 | 20881232 |
| Liver | hsa-miR-758-3p | MIMAT0003879 | 21885853 |
| Liver | hsa-miR-96-5p | MIMAT0000095 | 23459944 |
| Liver | hsa-miR-96-5p | MIMAT0000095 | 19167416 |
| Liver | mmu-let-7c-5p | MIMAT0000523 | 17438130 |
| Liver | mmu-miR-122-5p | MIMAT0000246 | 16459310 |
| Liver | mmu-miR-122-5p | MIMAT0000246 | 20582318 |
| Liver | mmu-miR-122-5p | MIMAT0000246 | 17179747 |
| Liver | mmu-miR-122-5p | MIMAT0000246 | 18158304 |
| Liver | mmu-miR-122-5p | MIMAT0000246 | 19487572 |
| Liver | mmu-miR-122-5p | MIMAT0000246 | 16258535 |
| Liver | mmu-miR-122-5p | MIMAT0000246 | 21364282 |
| Liver | mmu-miR-127-5p | MIMAT0004530 | 19878148 |
| Liver | mmu-miR-132-3p | MIMAT0000144 | 19843474 |
| Liver | mmu-miR-181b-5p | MIMAT0000673 | 20023698 |
| Liver | mmu-miR-194-5p | MIMAT0000224 | 21887698 |
| Liver | mmu-miR-200b-3p | MIMAT0000233 | 19787069 |
| Liver | mmu-miR-200c-3p | MIMAT0000657 | 19787069 |
| Liver | mmu-miR-21a-5p | MIMAT0000530 | 20167875 |
| Liver | mmu-miR-21a-5p | MIMAT0000530 | 20432256 |
| Liver | mmu-miR-22-3p | MIMAT0000531 | 19878148 |
| Liver | mmu-miR-221-3p | MIMAT0000669 | 20018759 |
| Liver | mmu-miR-23b-3p | MIMAT0000125 | 19582816 |
| Liver | mmu-miR-24-3p | MIMAT0000219 | 19582816 |
| Liver | mmu-miR-27a-3p | MIMAT0000537 | 19878148 |
| Liver | mmu-miR-27b-3p | MIMAT0000126 | 19582816 |
| Liver | mmu-miR-29a-3p | MIMAT0000535 | 20943204 |
| Liver | mmu-miR-29a-3p | MIMAT0000535 | 17652184 |
| Liver | mmu-miR-29a-5p | MIMAT0004631 | 20943204 |
| Liver | mmu-miR-29b-1-5p | MIMAT0004523 | 19878148 |
| Liver | mmu-miR-29b-3p | MIMAT0000127 | 17652184 |
| Liver | mmu-miR-29c-3p | MIMAT0000536 | 17652184 |
| Liver | mmu-miR-30a-5p | MIMAT0000128 | 19185580 |
| Liver | mmu-miR-33-5p | MIMAT0000667 | 20466885 |
| Liver | mmu-miR-34a-5p | MIMAT0000542 | 21216258 |
| Liver | mmu-miR-378a-3p | MIMAT0003151 | 20432256 |
| Liver | mmu-miR-378a-5p | MIMAT0000742 | 20432256 |
| Liver | mmu-miR-382-3p | MIMAT0004691 | 19878148 |
| Liver | mmu-miR-411-3p | MIMAT0001093 | 19878148 |
| Liver | mmu-miR-429-3p | MIMAT0001537 | 19167416 |
| Liver | mmu-miR-470-5p | MIMAT0002111 | 19878148 |
| Liver | mmu-miR-501-3p | MIMAT0003509 | 19878148 |
| Liver | mmu-miR-669b-5p | MIMAT0003476 | 19878148 |
| Liver | mmu-miR-676-3p | MIMAT0003782 | 19878148 |
| Liver | mmu-miR-93-5p | MIMAT0000540 | 21216258 |
| Liver | mmu-miR-96-5p | MIMAT0000541 | 19878148 |
| Liver | ppy-miR-122 | MIMAT0015746 | 18073344 |
| Liver | ppy-miR-29a | MIMAT0002363 | 17652184 |
| Liver | ppy-miR-29c | MIMAT0015735 | 17652184 |
| Liver | ptr-miR-122 | MIMAT0007963 | 18073344 |
| Liver | ptr-miR-29a | MIMAT0002364 | 17652184 |
| Liver | ptr-miR-29c | MIMAT0008082 | 17652184 |
| Liver | rno-let-7a-5p | MIMAT0000774 | 0 |
| Liver | rno-let-7b-5p | MIMAT0000775 | 0 |
| Liver | rno-let-7c-5p | MIMAT0000776 | 0 |
| Liver | rno-let-7d-3p | MIMAT0000563 | 0 |
| Liver | rno-let-7d-5p | MIMAT0000562 | 0 |
| Liver | rno-let-7e-5p | MIMAT0000777 | 0 |
| Liver | rno-let-7f-2-3p | MIMAT0017090 | 0 |
| Liver | rno-let-7f-5p | MIMAT0000778 | 0 |
| Liver | rno-let-7i-3p | MIMAT0004707 | 0 |
| Liver | rno-let-7i-5p | MIMAT0000779 | 0 |
| Liver | rno-miR-1-3p | MIMAT0003125 | 0 |
| Liver | rno-miR-100-5p | MIMAT0000822 | 0 |
| Liver | rno-miR-101a-3p | MIMAT0000823 | 0 |
| Liver | rno-miR-101b-3p | MIMAT0000615 | 0 |
| Liver | rno-miR-103-3p | MIMAT0000824 | 0 |
| Liver | rno-miR-107-3p | MIMAT0000826 | 0 |
| Liver | rno-miR-10a-5p | MIMAT0000782 | 0 |
| Liver | rno-miR-122-3p | MIMAT0017116 | 0 |
| Liver | rno-miR-122-5p | MIMAT0000827 | 0 |
| Liver | rno-miR-122-5p | MIMAT0000827 | 18073344 |
| Liver | rno-miR-125a-3p | MIMAT0004729 | 23045399 |
| Liver | rno-miR-125a-5p | MIMAT0000829 | 0 |
| Liver | rno-miR-125a-5p | MIMAT0000829 | 23045399 |
| Liver | rno-miR-125b-1-3p | MIMAT0004730 | 0 |
| Liver | rno-miR-125b-2-3p | MIMAT0026467 | 0 |
| Liver | rno-miR-125b-5p | MIMAT0000830 | 0 |
| Liver | rno-miR-126a-3p | MIMAT0000832 | 0 |
| Liver | rno-miR-126a-5p | MIMAT0000831 | 0 |
| Liver | rno-miR-127-3p | MIMAT0000833 | 18942116 |
| Liver | rno-miR-127-3p | MIMAT0000833 | 0 |
| Liver | rno-miR-128-3p | MIMAT0000834 | 0 |
| Liver | rno-miR-1306-5p | MIMAT0024851 | 0 |
| Liver | rno-miR-130a-3p | MIMAT0000836 | 0 |
| Liver | rno-miR-130b-3p | MIMAT0000837 | 0 |
| Liver | rno-miR-132-3p | MIMAT0000838 | 19843474 |
| Liver | rno-miR-133a-3p | MIMAT0000839 | 0 |
| Liver | rno-miR-133b-3p | MIMAT0003126 | 0 |
| Liver | rno-miR-135a-5p | MIMAT0000841 | 0 |
| Liver | rno-miR-135b-5p | MIMAT0000611 | 0 |
| Liver | rno-miR-136-3p | MIMAT0004733 | 0 |
| Liver | rno-miR-136-5p | MIMAT0000842 | 0 |
| Liver | rno-miR-137-3p | MIMAT0000843 | 0 |
| Liver | rno-miR-140-3p | MIMAT0000574 | 0 |
| Liver | rno-miR-140-5p | MIMAT0000573 | 0 |
| Liver | rno-miR-141-3p | MIMAT0000846 | 0 |
| Liver | rno-miR-142-3p | MIMAT0000848 | 0 |
| Liver | rno-miR-142-5p | MIMAT0000847 | 0 |
| Liver | rno-miR-143-5p | MIMAT0017129 | 0 |
| Liver | rno-miR-144-3p | MIMAT0000850 | 0 |
| Liver | rno-miR-146a-5p | MIMAT0000852 | 22735812 |
| Liver | rno-miR-146b-5p | MIMAT0005595 | 0 |
| Liver | rno-miR-148b-3p | MIMAT0000579 | 0 |
| Liver | rno-miR-150-5p | MIMAT0000853 | 19892940 |
| Liver | rno-miR-151-3p | MIMAT0000614 | 0 |
| Liver | rno-miR-152-3p | MIMAT0000854 | 0 |
| Liver | rno-miR-15b-5p | MIMAT0000784 | 0 |
| Liver | rno-miR-16-5p | MIMAT0000785 | 0 |
| Liver | rno-miR-17-1-3p | MIMAT0004710 | 0 |
| Liver | rno-miR-17-5p | MIMAT0000786 | 0 |
| Liver | rno-miR-182 | MIMAT0005300 | 19167416 |
| Liver | rno-miR-185-5p | MIMAT0000862 | 0 |
| Liver | rno-miR-186-3p | MIMAT0017143 | 0 |
| Liver | rno-miR-186-5p | MIMAT0000863 | 0 |
| Liver | rno-miR-188-5p | MIMAT0005301 | 0 |
| Liver | rno-miR-18a-5p | MIMAT0000787 | 19167416 |
| Liver | rno-miR-190a-3p | MIMAT0017145 | 0 |
| Liver | rno-miR-190a-5p | MIMAT0000865 | 0 |
| Liver | rno-miR-190b-5p | MIMAT0005302 | 0 |
| Liver | rno-miR-191a-5p | MIMAT0000866 | 0 |
| Liver | rno-miR-192-5p | MIMAT0000867 | 0 |
| Liver | rno-miR-194-5p | MIMAT0000869 | 19892940 |
| Liver | rno-miR-194-5p | MIMAT0000869 | 0 |
| Liver | rno-miR-1949 | MIMAT0017852 | 0 |
| Liver | rno-miR-195-5p | MIMAT0000870 | 0 |
| Liver | rno-miR-199a-3p | MIMAT0004738 | 0 |
| Liver | rno-miR-199a-5p | MIMAT0000872 | 0 |
| Liver | rno-miR-19a-3p | MIMAT0000789 | 0 |
| Liver | rno-miR-19b-3p | MIMAT0000788 | 0 |
| Liver | rno-miR-200a-3p | MIMAT0000874 | 19167416 |
| Liver | rno-miR-200a-3p | MIMAT0000874 | 19185571 |
| Liver | rno-miR-200b-3p | MIMAT0000875 | 19167416 |
| Liver | rno-miR-200b-3p | MIMAT0000875 | 18942116 |
| Liver | rno-miR-200c-3p | MIMAT0000873 | 19167416 |
| Liver | rno-miR-200c-3p | MIMAT0000873 | 0 |
| Liver | rno-miR-203a-3p | MIMAT0000876 | 0 |
| Liver | rno-miR-203a-5p | MIMAT0017153 | 0 |
| Liver | rno-miR-204-5p | MIMAT0000877 | 0 |
| Liver | rno-miR-206-3p | MIMAT0000879 | 0 |
| Liver | rno-miR-20a-3p | MIMAT0000603 | 0 |
| Liver | rno-miR-20a-5p | MIMAT0000602 | 0 |
| Liver | rno-miR-20b-5p | MIMAT0003211 | 0 |
| Liver | rno-miR-21-3p | MIMAT0004711 | 0 |
| Liver | rno-miR-21-5p | MIMAT0000790 | 0 |
| Liver | rno-miR-21-5p | MIMAT0000790 | 19167416 |
| Liver | rno-miR-210-3p | MIMAT0000881 | 0 |
| Liver | rno-miR-211-5p | MIMAT0000882 | 0 |
| Liver | rno-miR-215 | MIMAT0003118 | 0 |
| Liver | rno-miR-216a-5p | MIMAT0000886 | 0 |
| Liver | rno-miR-216b-5p | MIMAT0017846 | 0 |
| Liver | rno-miR-217-5p | MIMAT0000887 | 0 |
| Liver | rno-miR-218a-5p | MIMAT0000888 | 0 |
| Liver | rno-miR-22-3p | MIMAT0000791 | 0 |
| Liver | rno-miR-22-5p | MIMAT0003152 | 0 |
| Liver | rno-miR-221-3p | MIMAT0000890 | 0 |
| Liver | rno-miR-221-5p | MIMAT0017163 | 0 |
| Liver | rno-miR-223-3p | MIMAT0000892 | 0 |
| Liver | rno-miR-23a-3p | MIMAT0000792 | 0 |
| Liver | rno-miR-23b-3p | MIMAT0000793 | 0 |
| Liver | rno-miR-23b-5p | MIMAT0017099 | 0 |
| Liver | rno-miR-24-3p | MIMAT0000794 | 0 |
| Liver | rno-miR-25-3p | MIMAT0000795 | 0 |
| Liver | rno-miR-26a-5p | MIMAT0000796 | 0 |
| Liver | rno-miR-26b-5p | MIMAT0000797 | 0 |
| Liver | rno-miR-27a-3p | MIMAT0000799 | 0 |
| Liver | rno-miR-27a-3p | MIMAT0000799 | 19185571 |
| Liver | rno-miR-27b-3p | MIMAT0000798 | 0 |
| Liver | rno-miR-27b-3p | MIMAT0000798 | 19185571 |
| Liver | rno-miR-28-3p | MIMAT0004716 | 0 |
| Liver | rno-miR-29a-3p | MIMAT0000802 | 0 |
| Liver | rno-miR-29a-3p | MIMAT0000802 | 17652184 |
| Liver | rno-miR-29a-5p | MIMAT0004718 | 0 |
| Liver | rno-miR-29b-3p | MIMAT0000801 | 0 |
| Liver | rno-miR-29b-3p | MIMAT0000801 | 17652184 |
| Liver | rno-miR-29c-3p | MIMAT0000803 | 0 |
| Liver | rno-miR-29c-3p | MIMAT0000803 | 17652184 |
| Liver | rno-miR-30a-3p | MIMAT0000809 | 0 |
| Liver | rno-miR-30a-5p | MIMAT0000808 | 0 |
| Liver | rno-miR-30b-3p | MIMAT0004721 | 0 |
| Liver | rno-miR-30b-5p | MIMAT0000806 | 0 |
| Liver | rno-miR-30c-1-3p | MIMAT0004719 | 0 |
| Liver | rno-miR-30c-2-3p | MIMAT0005442 | 0 |
| Liver | rno-miR-30c-5p | MIMAT0000804 | 0 |
| Liver | rno-miR-30d-3p | MIMAT0004722 | 0 |
| Liver | rno-miR-30d-5p | MIMAT0000807 | 0 |
| Liver | rno-miR-30e-3p | MIMAT0004720 | 0 |
| Liver | rno-miR-30e-5p | MIMAT0000805 | 0 |
| Liver | rno-miR-31a-3p | MIMAT0017102 | 0 |
| Liver | rno-miR-31a-5p | MIMAT0000810 | 0 |
| Liver | rno-miR-320-3p | MIMAT0000903 | 0 |
| Liver | rno-miR-322-5p | MIMAT0001619 | 0 |
| Liver | rno-miR-329-5p | MIMAT0017031 | 0 |
| Liver | rno-miR-33-5p | MIMAT0000812 | 0 |
| Liver | rno-miR-335 | MIMAT0000575 | 0 |
| Liver | rno-miR-340-5p | MIMAT0004650 | 0 |
| Liver | rno-miR-341 | MIMAT0000587 | 0 |
| Liver | rno-miR-342-3p | MIMAT0000589 | 0 |
| Liver | rno-miR-3473 | MIMAT0024853 | 0 |
| Liver | rno-miR-34a-3p | MIMAT0017106 | 0 |
| Liver | rno-miR-34a-5p | MIMAT0000815 | 18942116 |
| Liver | rno-miR-34a-5p | MIMAT0000815 | 0 |
| Liver | rno-miR-34a-5p | MIMAT0000815 | 19167416 |
| Liver | rno-miR-350 | MIMAT0000604 | 0 |
| Liver | rno-miR-3556a | MIMAT0017821 | 0 |
| Liver | rno-miR-3556b | MIMAT0017818 | 0 |
| Liver | rno-miR-3557-3p | MIMAT0017820 | 0 |
| Liver | rno-miR-3557-5p | MIMAT0017819 | 0 |
| Liver | rno-miR-3558-5p | MIMAT0017825 | 0 |
| Liver | rno-miR-3559-3p | MIMAT0017828 | 0 |
| Liver | rno-miR-3571 | MIMAT0017851 | 0 |
| Liver | rno-miR-3574 | MIMAT0017860 | 0 |
| Liver | rno-miR-3586-3p | MIMAT0017881 | 0 |
| Liver | rno-miR-3587 | MIMAT0017883 | 0 |
| Liver | rno-miR-3588 | MIMAT0017887 | 0 |
| Liver | rno-miR-3590-3p | MIMAT0017890 | 0 |
| Liver | rno-miR-3591 | MIMAT0017893 | 0 |
| Liver | rno-miR-3596a | MIMAT0017886 | 0 |
| Liver | rno-miR-3596b | MIMAT0017871 | 0 |
| Liver | rno-miR-3596c | MIMAT0017877 | 0 |
| Liver | rno-miR-3596d | MIMAT0017823 | 0 |
| Liver | rno-miR-362-3p | MIMAT0017357 | 0 |
| Liver | rno-miR-362-5p | MIMAT0012828 | 0 |
| Liver | rno-miR-375-3p | MIMAT0005307 | 0 |
| Liver | rno-miR-376a-3p | MIMAT0003198 | 0 |
| Liver | rno-miR-378a-3p | MIMAT0003379 | 0 |
| Liver | rno-miR-378a-5p | MIMAT0003378 | 0 |
| Liver | rno-miR-378b | MIMAT0024855 | 0 |
| Liver | rno-miR-379-5p | MIMAT0003192 | 0 |
| Liver | rno-miR-423-5p | MIMAT0017305 | 0 |
| Liver | rno-miR-425-5p | MIMAT0005314 | 0 |
| Liver | rno-miR-429 | MIMAT0001538 | 0 |
| Liver | rno-miR-429 | MIMAT0001538 | 19167416 |
| Liver | rno-miR-449a-5p | MIMAT0001543 | 0 |
| Liver | rno-miR-450a-5p | MIMAT0001547 | 0 |
| Liver | rno-miR-451-5p | MIMAT0001633 | 0 |
| Liver | rno-miR-455-3p | MIMAT0017308 | 0 |
| Liver | rno-miR-455-5p | MIMAT0005316 | 0 |
| Liver | rno-miR-455-5p | MIMAT0005316 | 23045399 |
| Liver | rno-miR-466b-1-3p | MIMAT0017285 | 0 |
| Liver | rno-miR-466b-2-3p | MIMAT0017286 | 0 |
| Liver | rno-miR-466b-5p | MIMAT0005278 | 0 |
| Liver | rno-miR-466c-5p | MIMAT0005279 | 0 |
| Liver | rno-miR-497-5p | MIMAT0003383 | 0 |
| Liver | rno-miR-499-3p | MIMAT0017227 | 0 |
| Liver | rno-miR-499-5p | MIMAT0003381 | 0 |
| Liver | rno-miR-501-3p | MIMAT0017198 | 0 |
| Liver | rno-miR-501-5p | MIMAT0003116 | 0 |
| Liver | rno-miR-503-5p | MIMAT0003213 | 0 |
| Liver | rno-miR-511-3p | MIMAT0017358 | 0 |
| Liver | rno-miR-532-3p | MIMAT0005323 | 0 |
| Liver | rno-miR-532-5p | MIMAT0005322 | 0 |
| Liver | rno-miR-542-5p | MIMAT0003178 | 0 |
| Liver | rno-miR-547-3p | MIMAT0012851 | 0 |
| Liver | rno-miR-582-5p | MIMAT0012833 | 0 |
| Liver | rno-miR-6215 | MIMAT0024854 | 0 |
| Liver | rno-miR-664-1-5p | MIMAT0017228 | 0 |
| Liver | rno-miR-664-2-5p | MIMAT0017229 | 0 |
| Liver | rno-miR-664-3p | MIMAT0003382 | 0 |
| Liver | rno-miR-674-5p | MIMAT0005329 | 0 |
| Liver | rno-miR-708-5p | MIMAT0005331 | 0 |
| Liver | rno-miR-743b-3p | MIMAT0005280 | 0 |
| Liver | rno-miR-7a-1-3p | MIMAT0000607 | 0 |
| Liver | rno-miR-7a-5p | MIMAT0000606 | 0 |
| Liver | rno-miR-7b | MIMAT0000780 | 0 |
| Liver | rno-miR-802-3p | MIMAT0017362 | 0 |
| Liver | rno-miR-802-5p | MIMAT0012840 | 0 |
| Liver | rno-miR-872-3p | MIMAT0005283 | 0 |
| Liver | rno-miR-872-5p | MIMAT0005282 | 0 |
| Liver | rno-miR-92a-1-5p | MIMAT0017107 | 0 |
| Liver | rno-miR-92a-3p | MIMAT0000816 | 0 |
| Liver | rno-miR-92b-3p | MIMAT0005340 | 0 |
| Liver | rno-miR-96-5p | MIMAT0000818 | 0 |
| Liver | rno-miR-96-5p | MIMAT0000818 | 19167416 |
| Liver | rno-miR-98-5p | MIMAT0000819 | 0 |
| Liver | rno-miR-99a-5p | MIMAT0000820 | 0 |
| Liver | rno-miR-99b-5p | MIMAT0000821 | 0 |
| Liver | ssc-miR-122 | MIMAT0002119 | 18073344 |
| Liver | ssc-miR-29a | MIMAT0013870 | 17652184 |
| Liver | ssc-miR-29c | MIMAT0002166 | 17652184 |
| Liver | xtr-miR-122 | MIMAT0003585 | 18073344 |
| Liver | xtr-miR-29a | MIMAT0003656 | 17652184 |
| Locus Coeruleus | mmu-miR-16-5p | MIMAT0000527 | 20847275 |
| Lung | bta-miR-335 | MIMAT0009291 | 18185580 |
| Lung | cfa-miR-335 | MIMAT0006624 | 18185580 |
| Lung | hsa-let-7a-5p | MIMAT0000062 | 20005451 |
| Lung | hsa-let-7a-5p | MIMAT0000062 | 20033209 |
| Lung | hsa-let-7a-5p | MIMAT0000062 | 15766527 |
| Lung | hsa-let-7a-5p | MIMAT0000062 | 19818775 |
| Lung | hsa-let-7a-5p | MIMAT0000062 | 16651716 |
| Lung | hsa-let-7a-5p | MIMAT0000062 | 20418948 |
| Lung | hsa-let-7a-5p | MIMAT0000062 | 17942906 |
| Lung | hsa-let-7b-3p | MIMAT0004482 | 18379589 |
| Lung | hsa-let-7b-3p | MIMAT0004482 | 17437991 |
| Lung | hsa-let-7b-3p | MIMAT0004482 | 17699775 |
| Lung | hsa-let-7b-5p | MIMAT0000063 | 17942906 |
| Lung | hsa-let-7b-5p | MIMAT0000063 | 18379589 |
| Lung | hsa-let-7b-5p | MIMAT0000063 | 19966857 |
| Lung | hsa-let-7b-5p | MIMAT0000063 | 17437991 |
| Lung | hsa-let-7b-5p | MIMAT0000063 | 17699775 |
| Lung | hsa-let-7c-5p | MIMAT0000064 | 15766527 |
| Lung | hsa-let-7d-5p | MIMAT0000065 | 20395557 |
| Lung | hsa-let-7d-5p | MIMAT0000065 | 21616524 |
| Lung | hsa-let-7e-3p | MIMAT0004485 | 17437991 |
| Lung | hsa-let-7e-5p | MIMAT0000066 | 17437991 |
| Lung | hsa-let-7f-5p | MIMAT0000067 | 19956384 |
| Lung | hsa-let-7f-5p | MIMAT0000067 | 21616524 |
| Lung | hsa-let-7g-5p | MIMAT0000414 | 18308936 |
| Lung | hsa-let-7g-5p | MIMAT0000414 | 21616524 |
| Lung | hsa-let-7i-5p | MIMAT0000415 | 21616524 |
| Lung | hsa-miR-1 | MIMAT0000416 | 23142026 |
| Lung | hsa-miR-106a-5p | MIMAT0000103 | 16461460 |
| Lung | hsa-miR-107 | MIMAT0000104 | 19688090 |
| Lung | hsa-miR-125a-5p | MIMAT0000443 | 21220473 |
| Lung | hsa-miR-125b-5p | MIMAT0000423 | 19293287 |
| Lung | hsa-miR-126-3p | MIMAT0000445 | 19223090 |
| Lung | hsa-miR-126-3p | MIMAT0000445 | 18602365 |
| Lung | hsa-miR-126-3p | MIMAT0000445 | 20083669 |
| Lung | hsa-miR-128-2-5p | MIMAT0031095 | 18304967 |
| Lung | hsa-miR-133b | MIMAT0000770 | 19654003 |
| Lung | hsa-miR-134-5p | MIMAT0000447 | 20371173 |
| Lung | hsa-miR-137 | MIMAT0000429 | 23178712 |
| Lung | hsa-miR-143-3p | MIMAT0000435 | 19472311 |
| Lung | hsa-miR-145-5p | MIMAT0000437 | 21496429 |
| Lung | hsa-miR-145-5p | MIMAT0000437 | 21092188 |
| Lung | hsa-miR-145-5p | MIMAT0000437 | 19996288 |
| Lung | hsa-miR-146b-5p | MIMAT0002809 | 21305051 |
| Lung | hsa-miR-155-5p | MIMAT0000646 | 21093163 |
| Lung | hsa-miR-155-5p | MIMAT0000646 | 19701459 |
| Lung | hsa-miR-155-5p | MIMAT0000646 | 16675453 |
| Lung | hsa-miR-155-5p | MIMAT0000646 | 20427544 |
| Lung | hsa-miR-15a-5p | MIMAT0000068 | 19549910 |
| Lung | hsa-miR-16-5p | MIMAT0000069 | 19549910 |
| Lung | hsa-miR-183-5p | MIMAT0000261 | 18840437 |
| Lung | hsa-miR-185-5p | MIMAT0000455 | 19688090 |
| Lung | hsa-miR-188-5p | MIMAT0000457 | 19223510 |
| Lung | hsa-miR-196a-5p | MIMAT0000226 | 19418581 |
| Lung | hsa-miR-197-3p | MIMAT0000227 | 19671678 |
| Lung | hsa-miR-19a-3p | MIMAT0000073 | 21751348 |
| Lung | hsa-miR-200b-3p | MIMAT0000318 | 21993663 |
| Lung | hsa-miR-200b-3p | MIMAT0000318 | 22139708 |
| Lung | hsa-miR-200c-3p | MIMAT0000617 | 21207483 |
| Lung | hsa-miR-200c-3p | MIMAT0000617 | 19223510 |
| Lung | hsa-miR-200c-3p | MIMAT0000617 | 21993663 |
| Lung | hsa-miR-200c-3p | MIMAT0000617 | 21294122 |
| Lung | hsa-miR-204-5p | MIMAT0000265 | 20369013 |
| Lung | hsa-miR-20a-5p | MIMAT0000075 | 21751348 |
| Lung | hsa-miR-20a-5p | MIMAT0000075 | 18632605 |
| Lung | hsa-miR-20a-5p | MIMAT0000075 | 16461460 |
| Lung | hsa-miR-21-5p | MIMAT0000076 | 18270520 |
| Lung | hsa-miR-21-5p | MIMAT0000076 | 22956424 |
| Lung | hsa-miR-21-5p | MIMAT0000076 | 18372920 |
| Lung | hsa-miR-21-5p | MIMAT0000076 | 17968323 |
| Lung | hsa-miR-21-5p | MIMAT0000076 | 20223231 |
| Lung | hsa-miR-22-3p | MIMAT0000077 | 22484852 |
| Lung | hsa-miR-221-3p | MIMAT0000278 | 18246122 |
| Lung | hsa-miR-222-3p | MIMAT0000279 | 21656127 |
| Lung | hsa-miR-222-3p | MIMAT0000279 | 18246122 |
| Lung | hsa-miR-223-3p | MIMAT0000280 | 18278031 |
| Lung | hsa-miR-223-3p | MIMAT0000280 | 21305051 |
| Lung | hsa-miR-26a-5p | MIMAT0000082 | 16461460 |
| Lung | hsa-miR-29a-3p | MIMAT0000086 | 19818597 |
| Lung | hsa-miR-29a-3p | MIMAT0000086 | 17890317 |
| Lung | hsa-miR-29b-3p | MIMAT0000100 | 21305051 |
| Lung | hsa-miR-29b-3p | MIMAT0000100 | 17890317 |
| Lung | hsa-miR-29c-3p | MIMAT0000681 | 21305051 |
| Lung | hsa-miR-29c-3p | MIMAT0000681 | 17890317 |
| Lung | hsa-miR-30c-5p | MIMAT0000244 | 19223510 |
| Lung | hsa-miR-30e-5p | MIMAT0000692 | 19223510 |
| Lung | hsa-miR-31-3p | MIMAT0004504 | 20237410 |
| Lung | hsa-miR-31-5p | MIMAT0000089 | 21048943 |
| Lung | hsa-miR-31-5p | MIMAT0000089 | 20237410 |
| Lung | hsa-miR-31-5p | MIMAT0000089 | 23539435 |
| Lung | hsa-miR-335-5p | MIMAT0000765 | 18185580 |
| Lung | hsa-miR-34a-5p | MIMAT0000255 | 21294122 |
| Lung | hsa-miR-409-3p | MIMAT0001639 | 22531314 |
| Lung | hsa-miR-429 | MIMAT0001536 | 21993663 |
| Lung | hsa-miR-449c-5p | MIMAT0010251 | 23507140 |
| Lung | hsa-miR-451a | MIMAT0001631 | 21358675 |
| Lung | hsa-miR-483-3p | MIMAT0002173 | 21305051 |
| Lung | hsa-miR-499a-5p | MIMAT0002870 | 21934092 |
| Lung | hsa-miR-499b-5p | MIMAT0019897 | 21934092 |
| Lung | hsa-miR-574-5p | MIMAT0004795 | 21305051 |
| Lung | hsa-miR-622 | MIMAT0003291 | 22016468 |
| Lung | hsa-miR-7-5p | MIMAT0000252 | 19073608 |
| Lung | hsa-miR-93-5p | MIMAT0000093 | 19671678 |
| Lung | hsa-miR-98-5p | MIMAT0000096 | 19671678 |
| Lung | hsa-miR-98-5p | MIMAT0000096 | 21616524 |
| Lung | hsa-miR-98-5p | MIMAT0000096 | 17942906 |
| Lung | mmu-let-7a-5p | MIMAT0000521 | 20630862 |
| Lung | mmu-miR-106b-5p | MIMAT0000386 | 19559694 |
| Lung | mmu-miR-10b-5p | MIMAT0000208 | 20351690 |
| Lung | mmu-miR-122-5p | MIMAT0000246 | 16258535 |
| Lung | mmu-miR-127-3p | MIMAT0000139 | 22287715 |
| Lung | mmu-miR-135b-5p | MIMAT0000612 | 23440414 |
| Lung | mmu-miR-155-5p | MIMAT0000165 | 19701459 |
| Lung | mmu-miR-155-5p | MIMAT0000165 | 17463290 |
| Lung | mmu-miR-17-5p | MIMAT0000649 | 19559694 |
| Lung | mmu-miR-17-5p | MIMAT0000649 | 17765889 |
| Lung | mmu-miR-200a-3p | MIMAT0000519 | 21115742 |
| Lung | mmu-miR-200b-3p | MIMAT0000233 | 21115742 |
| Lung | mmu-miR-200b-3p | MIMAT0000233 | 19787069 |
| Lung | mmu-miR-200c-3p | MIMAT0000657 | 21115742 |
| Lung | mmu-miR-200c-3p | MIMAT0000657 | 19787069 |
| Lung | mmu-miR-204-5p | MIMAT0000237 | 20369013 |
| Lung | mmu-miR-20a-5p | MIMAT0000529 | 19559694 |
| Lung | mmu-miR-21a-5p | MIMAT0000530 | 18372920 |
| Lung | mmu-miR-21a-5p | MIMAT0000530 | 19748927 |
| Lung | mmu-miR-223-3p | MIMAT0000665 | 18278031 |
| Lung | mmu-miR-31-5p | MIMAT0000538 | 20237410 |
| Lung | mmu-miR-429-3p | MIMAT0001537 | 21115742 |
| Lung | ppy-miR-335 | MIMAT0015837 | 18185580 |
| Lung | ptr-miR-335 | MIMAT0008104 | 18185580 |
| Lung | rno-let-7a-5p | MIMAT0000774 | 17942906 |
| Lung | rno-miR-126a-3p | MIMAT0000832 | 18780894 |
| Lung | rno-miR-126a-5p | MIMAT0000831 | 18780894 |
| Lung | rno-miR-335 | MIMAT0000575 | 18185580 |
| Lung | ssc-miR-335 | MIMAT0013955 | 18185580 |
| Lymph | hsa-miR-101-3p | MIMAT0000099 | 19043531 |
| Lymph | hsa-miR-135a-5p | MIMAT0000428 | 19666866 |
| Lymph | hsa-miR-138-5p | MIMAT0000430 | 23389731 |
| Lymph | hsa-miR-143-3p | MIMAT0000435 | 23276710 |
| Lymph | hsa-miR-148a-3p | MIMAT0000243 | 18768788 |
| Lymph | hsa-miR-16-2-3p | MIMAT0004518 | 20309880 |
| Lymph | hsa-miR-181a-5p | MIMAT0000256 | 20841506 |
| Lymph | hsa-miR-200c-3p | MIMAT0000617 | 21207483 |
| Lymph | hsa-miR-200c-3p | MIMAT0000617 | 21294122 |
| Lymph | hsa-miR-21-5p | MIMAT0000076 | 19276261 |
| Lymph | hsa-miR-21-5p | MIMAT0000076 | 20346171 |
| Lymph | hsa-miR-21-5p | MIMAT0000076 | 22267008 |
| Lymph | hsa-miR-21-5p | MIMAT0000076 | 22956424 |
| Lymph | hsa-miR-223-3p | MIMAT0000280 | 22270966 |
| Lymph | hsa-miR-26a-5p | MIMAT0000082 | 23338972 |
| Lymph | hsa-miR-339-5p | MIMAT0000764 | 20932331 |
| Lymph | hsa-miR-34a-5p | MIMAT0000255 | 21294122 |
| Lymph | hsa-miR-34a-5p | MIMAT0000255 | 20309880 |
| Lymph | hsa-miR-34b-3p | MIMAT0004676 | 18768788 |
| Lymph | hsa-miR-34c-5p | MIMAT0000686 | 18768788 |
| Lymph | hsa-miR-497-5p | MIMAT0002820 | 23453369 |
| Lymph | hsa-miR-499a-5p | MIMAT0002870 | 21934092 |
| Lymph | hsa-miR-499b-5p | MIMAT0019897 | 21934092 |
| Lymph Nodes | hsa-miR-101-3p | MIMAT0000099 | 19043531 |
| Lymph Nodes | hsa-miR-148a-3p | MIMAT0000243 | 18768788 |
| Lymph Nodes | hsa-miR-16-2-3p | MIMAT0004518 | 20309880 |
| Lymph Nodes | hsa-miR-21-5p | MIMAT0000076 | 22267008 |
| Lymph Nodes | hsa-miR-34a-5p | MIMAT0000255 | 20309880 |
| Lymph Nodes | hsa-miR-34b-3p | MIMAT0004676 | 18768788 |
| Lymph Nodes | hsa-miR-34c-5p | MIMAT0000686 | 18768788 |
| Lymphocytes | hsa-let-7d-5p | MIMAT0000065 | 21616524 |
| Lymphocytes | hsa-let-7f-5p | MIMAT0000067 | 21616524 |
| Lymphocytes | hsa-let-7g-5p | MIMAT0000414 | 21616524 |
| Lymphocytes | hsa-let-7i-5p | MIMAT0000415 | 21616524 |
| Lymphocytes | hsa-miR-101-3p | MIMAT0000099 | 19043531 |
| Lymphocytes | hsa-miR-107 | MIMAT0000104 | 20884628 |
| Lymphocytes | hsa-miR-122-5p | MIMAT0000421 | 20884628 |
| Lymphocytes | hsa-miR-125b-5p | MIMAT0000423 | 20497960 |
| Lymphocytes | hsa-miR-146a-5p | MIMAT0000449 | 18057241 |
| Lymphocytes | hsa-miR-146a-5p | MIMAT0000449 | 19965651 |
| Lymphocytes | hsa-miR-148a-3p | MIMAT0000243 | 19435428 |
| Lymphocytes | hsa-miR-150-5p | MIMAT0000451 | 17923094 |
| Lymphocytes | hsa-miR-150-5p | MIMAT0000451 | 18667440 |
| Lymphocytes | hsa-miR-155-5p | MIMAT0000646 | 20209161 |
| Lymphocytes | hsa-miR-155-5p | MIMAT0000646 | 20680360 |
| Lymphocytes | hsa-miR-155-5p | MIMAT0000646 | 19386588 |
| Lymphocytes | hsa-miR-155-5p | MIMAT0000646 | 18367535 |
| Lymphocytes | hsa-miR-15a-5p | MIMAT0000068 | 22379033 |
| Lymphocytes | hsa-miR-15b-5p | MIMAT0000417 | 22379033 |
| Lymphocytes | hsa-miR-16-5p | MIMAT0000069 | 22379033 |
| Lymphocytes | hsa-miR-181c-5p | MIMAT0000258 | 21112091 |
| Lymphocytes | hsa-miR-198 | MIMAT0000228 | 18667440 |
| Lymphocytes | hsa-miR-19b-3p | MIMAT0000074 | 19435428 |
| Lymphocytes | hsa-miR-20a-5p | MIMAT0000075 | 19435428 |
| Lymphocytes | hsa-miR-214-3p | MIMAT0000271 | 20548023 |
| Lymphocytes | hsa-miR-214-3p | MIMAT0000271 | 19435428 |
| Lymphocytes | hsa-miR-221-3p | MIMAT0000278 | 21236259 |
| Lymphocytes | hsa-miR-221-3p | MIMAT0000278 | 20110463 |
| Lymphocytes | hsa-miR-26a-5p | MIMAT0000082 | 23338972 |
| Lymphocytes | hsa-miR-29a-3p | MIMAT0000086 | 20086245 |
| Lymphocytes | hsa-miR-29b-3p | MIMAT0000100 | 20086245 |
| Lymphocytes | hsa-miR-29c-3p | MIMAT0000681 | 20086245 |
| Lymphocytes | hsa-miR-34a-5p | MIMAT0000255 | 20598588 |
| Lymphocytes | hsa-miR-520h | MIMAT0002867 | 19435428 |
| Lymphocytes | hsa-miR-92a-3p | MIMAT0000092 | 19435428 |
| Lymphocytes | hsa-miR-98-5p | MIMAT0000096 | 21616524 |
| Lymphocytes | mmu-miR-125b-5p | MIMAT0000136 | 21118986 |
| Lymphocytes | mmu-miR-146a-5p | MIMAT0000158 | 18791161 |
| Lymphocytes | mmu-miR-148a-3p | MIMAT0000516 | 21068402 |
| Lymphocytes | mmu-miR-148b-3p | MIMAT0000580 | 21068402 |
| Lymphocytes | mmu-miR-150-5p | MIMAT0000160 | 17923094 |
| Lymphocytes | mmu-miR-152-3p | MIMAT0000162 | 21068402 |
| Lymphocytes | mmu-miR-155-5p | MIMAT0000165 | 18450484 |
| Lymphocytes | mmu-miR-155-5p | MIMAT0000165 | 18455451 |
| Lymphocytes | mmu-miR-155-5p | MIMAT0000165 | 17463290 |
| Lymphocytes | mmu-miR-214-3p | MIMAT0000661 | 20548023 |
| Lymphocytes | mmu-miR-223-3p | MIMAT0000665 | 20935160 |
| Lymphocytes | mmu-miR-223-3p | MIMAT0000665 | 22043014 |
| Lymphocytes | mmu-miR-34a-5p | MIMAT0000542 | 20598588 |
| Lymphocytes Null | hsa-miR-1 | MIMAT0000416 | 18593903 |
| Lymphoid Tissue | hsa-miR-101-3p | MIMAT0000099 | 19043531 |
| Lymphoid Tissue | hsa-miR-16-5p | MIMAT0000069 | 17351108 |
| Lymphoid Tissue | hsa-miR-200a-3p | MIMAT0000682 | 22183793 |
| Lymphoid Tissue | hsa-miR-200b-3p | MIMAT0000318 | 22183793 |
| Lymphoid Tissue | hsa-miR-200c-3p | MIMAT0000617 | 22183793 |
| Lymphoid Tissue | hsa-miR-7-5p | MIMAT0000252 | 18823940 |
| Macrophages | hsa-let-7b-5p | MIMAT0000063 | 20130213 |
| Macrophages | hsa-miR-101-3p | MIMAT0000099 | 21068409 |
| Macrophages | hsa-miR-141-3p | MIMAT0000432 | 18835392 |
| Macrophages | hsa-miR-145-5p | MIMAT0000437 | 20130213 |
| Macrophages | hsa-miR-146a-5p | MIMAT0000449 | 20542134 |
| Macrophages | hsa-miR-155-5p | MIMAT0000646 | 21036908 |
| Macrophages | hsa-miR-155-5p | MIMAT0000646 | 19359473 |
| Macrophages | hsa-miR-155-5p | MIMAT0000646 | 19386588 |
| Macrophages | hsa-miR-155-5p | MIMAT0000646 | 19887047 |
| Macrophages | hsa-miR-155-5p | MIMAT0000646 | 21097505 |
| Macrophages | hsa-miR-155-5p | MIMAT0000646 | 19596814 |
| Macrophages | hsa-miR-155-5p | MIMAT0000646 | 21030878 |
| Macrophages | hsa-miR-155-5p | MIMAT0000646 | 22473996 |
| Macrophages | hsa-miR-192-5p | MIMAT0000222 | 18835392 |
| Macrophages | hsa-miR-195-5p | MIMAT0000461 | 20952681 |
| Macrophages | hsa-miR-198 | MIMAT0000228 | 19148268 |
| Macrophages | hsa-miR-200a-3p | MIMAT0000682 | 18835392 |
| Macrophages | hsa-miR-203a | MIMAT0000264 | 23522925 |
| Macrophages | hsa-miR-21-5p | MIMAT0000076 | 18384814 |
| Macrophages | hsa-miR-217 | MIMAT0000274 | 18835392 |
| Macrophages | hsa-miR-26a-5p | MIMAT0000082 | 20130213 |
| Macrophages | hsa-miR-27b-3p | MIMAT0000419 | 20164187 |
| Macrophages | hsa-miR-27b-3p | MIMAT0000419 | 18835392 |
| Macrophages | hsa-miR-33a-5p | MIMAT0000091 | 20466885 |
| Macrophages | hsa-miR-34a-5p | MIMAT0000255 | 20130213 |
| Macrophages | hsa-miR-451a | MIMAT0001631 | 19318487 |
| Macrophages | hsa-miR-532-5p | MIMAT0002888 | 18835392 |
| Macrophages | hsa-miR-603 | MIMAT0003271 | 18835392 |
| Macrophages | hsa-miR-758-3p | MIMAT0003879 | 21885853 |
| Macrophages | hsa-miR-769-5p | MIMAT0003886 | 18835392 |
| Macrophages | mmu-let-7e-3p | MIMAT0017016 | 19699171 |
| Macrophages | mmu-let-7e-5p | MIMAT0000524 | 19699171 |
| Macrophages | mmu-miR-101a-3p | MIMAT0000133 | 21068409 |
| Macrophages | mmu-miR-122-5p | MIMAT0000246 | 21364282 |
| Macrophages | mmu-miR-124-3p | MIMAT0000134 | 21131957 |
| Macrophages | mmu-miR-127-3p | MIMAT0000139 | 22287715 |
| Macrophages | mmu-miR-146a-5p | MIMAT0000158 | 19596990 |
| Macrophages | mmu-miR-155-5p | MIMAT0000165 | 20937844 |
| Macrophages | mmu-miR-155-5p | MIMAT0000165 | 19699171 |
| Macrophages | mmu-miR-21a-5p | MIMAT0000530 | 21273303 |
| Macrophages | mmu-miR-33-5p | MIMAT0000667 | 20466885 |
| Macrophages | mmu-miR-33-5p | MIMAT0000667 | 21285396 |
| Macrophages | mmu-miR-466l-3p | MIMAT0005830 | 20410487 |
| Macrophages Peritoneal | hsa-miR-758-3p | MIMAT0003879 | 21885853 |
| Macrophages Peritoneal | mmu-miR-33-5p | MIMAT0000667 | 21285396 |
| Mammary Arteries | hsa-miR-155-5p | MIMAT0000646 | 23108656 |
| Mammary Glands Human | hsa-miR-1258 | MIMAT0005909 | 21266359 |
| Mammary Glands Human | hsa-miR-155-5p | MIMAT0000646 | 18794355 |
| Mammary Glands Human | mmu-miR-101a-3p | MIMAT0000133 | 19281778 |
| Mammary Glands Human | mmu-miR-132-3p | MIMAT0000144 | 21057503 |
| Mammary Glands Human | mmu-miR-132-5p | MIMAT0016984 | 21057503 |
| Mammary Glands Human | mmu-miR-155-5p | MIMAT0000165 | 18794355 |
| Mammary Glands Human | mmu-miR-212-3p | MIMAT0000659 | 21057503 |
| Mast Cells | hsa-miR-132-3p | MIMAT0000426 | 21853268 |
| Maxillary Sinus | hsa-miR-1 | MIMAT0000416 | 21701775 |
| Maxillary Sinus | hsa-miR-133a-3p | MIMAT0000427 | 21701775 |
| Megakaryocyte-Erythroid | hsa-miR-150-5p | MIMAT0000451 | 18539114 |
| Progenitor Cells | | | |
| Megakaryocytes | hsa-let-7a-5p | MIMAT0000062 | 20445018 |
| Megakaryocytes | hsa-let-7c-5p | MIMAT0000064 | 20445018 |
| Megakaryocytes | hsa-let-7d-5p | MIMAT0000065 | 20445018 |
| Megakaryocytes | hsa-let-7e-5p | MIMAT0000066 | 20445018 |
| Megakaryocytes | hsa-let-7f-5p | MIMAT0000067 | 20445018 |
| Megakaryocytes | hsa-miR-10a-5p | MIMAT0000253 | 16549775 |
| Megakaryocytes | hsa-miR-130a-3p | MIMAT0000425 | 16549775 |
| Megakaryocytes | hsa-miR-150-5p | MIMAT0000451 | 18539114 |
| Megakaryocytes | hsa-miR-151a-5p | MIMAT0004697 | 20445018 |
| Megakaryocytes | hsa-miR-28-5p | MIMAT0000085 | 20445018 |
| Megakaryocytes | hsa-miR-708-3p | MIMAT0004927 | 20445018 |
| Megakaryocytes | hsa-miR-98-5p | MIMAT0000096 | 20445018 |
| Melanocytes | hsa-let-7a-5p | MIMAT0000062 | 18679415 |
| Melanocytes | hsa-miR-137 | MIMAT0000429 | 21051724 |
| Melanocytes | hsa-miR-155-5p | MIMAT0000646 | 21466664 |
| Melanocytes | hsa-miR-196a-5p | MIMAT0000226 | 20480203 |
| Melanocytes | hsa-miR-196a-5p | MIMAT0000226 | 21077158 |
| Melanocytes | hsa-miR-211-5p | MIMAT0000268 | 21072171 |
| Melanocytes | hsa-miR-211-5p | MIMAT0000268 | 21435193 |
| Melanocytes | hsa-miR-221-3p | MIMAT0000278 | 23400877 |
| Melanocytes | hsa-miR-222-3p | MIMAT0000279 | 23400877 |
| Melanocytes | hsa-miR-34a-5p | MIMAT0000255 | 19029026 |
| Melanocytes | hsa-miR-532-5p | MIMAT0002888 | 19336521 |
| Melanocytes | hsa-miR-7-5p | MIMAT0000252 | 19029026 |
| Membranes | hsa-miR-1 | MIMAT0000416 | 17401374 |
| Membranes | hsa-miR-128-3p | MIMAT0000424 | 21143953 |
| Membranes | hsa-miR-146a-5p | MIMAT0000449 | 18057241 |
| Membranes | hsa-miR-151a-3p | MIMAT0000757 | 21143953 |
| Membranes | hsa-miR-155-5p | MIMAT0000646 | 19386588 |
| Membranes | hsa-miR-155-5p | MIMAT0000646 | 22387553 |
| Membranes | hsa-miR-15a-5p | MIMAT0000068 | 20385127 |
| Membranes | hsa-miR-182-5p | MIMAT0000259 | 23430586 |
| Membranes | hsa-miR-185-5p | MIMAT0000455 | 21143953 |
| Membranes | hsa-miR-204-5p | MIMAT0000265 | 20056717 |
| Membranes | hsa-miR-21-5p | MIMAT0000076 | 22387553 |
| Membranes | hsa-miR-21-5p | MIMAT0000076 | 20056717 |
| Membranes | hsa-miR-210-3p | MIMAT0000267 | 19826008 |
| Membranes | hsa-miR-29a-3p | MIMAT0000086 | 19951903 |
| Membranes | hsa-miR-30b-5p | MIMAT0000420 | 22387553 |
| Membranes | hsa-miR-320a | MIMAT0000510 | 20628061 |
| Membranes | hsa-miR-338-3p | MIMAT0000763 | 18991333 |
| Membranes | hsa-miR-509-3p | MIMAT0002881 | 21143953 |
| Membranes | hsa-miR-92b-3p | MIMAT0003218 | 21030610 |
| Membranes | mmu-miR-143-3p | MIMAT0000247 | 20351064 |
| Membranes | mmu-miR-145a-5p | MIMAT0000157 | 20351064 |
| Membranes | mmu-miR-200b-3p | MIMAT0000233 | 19787069 |
| Membranes | mmu-miR-200c-3p | MIMAT0000657 | 19787069 |
| Membranes | mmu-miR-23a-3p | MIMAT0000532 | 19259393 |
| Membranes | mmu-miR-23b-3p | MIMAT0000125 | 19259393 |
| Membranes | rno-miR-1-3p | MIMAT0003125 | 17401374 |
| Membranes | rno-miR-1-3p | MIMAT0003125 | 18801338 |
| Membranes | rno-miR-338-3p | MIMAT0000581 | 18991333 |
| Meninges | hsa-miR-200a-3p | MIMAT0000682 | 19703993 |
| Mesangial Cells | hsa-miR-328-3p | MIMAT0000752 | 18716028 |
| Mesangial Cells | hsa-miR-377-3p | MIMAT0000730 | 18716028 |
| Mesangial Cells | mmu-miR-192-5p | MIMAT0000517 | 17360662 |
| Mesangial Cells | mmu-miR-215-5p | MIMAT0000904 | 17360662 |
| Mesangial Cells | mmu-miR-216a-5p | MIMAT0000662 | 20713358 |
| Mesangial Cells | mmu-miR-216a-5p | MIMAT0000662 | 19543271 |
| Mesangial Cells | mmu-miR-217-5p | MIMAT0000679 | 19543271 |
| Mesangial Cells | rno-miR-192-5p | MIMAT0000867 | 20393144 |
| Mesangial Cells | rno-miR-215 | MIMAT0003118 | 20393144 |
| Mesangial Cells | rno-miR-25-3p | MIMAT0000795 | 21071935 |
| Mesangial Cells | rno-miR-92b-3p | MIMAT0005340 | 21071935 |
| Mesencephalon | hsa-miR-133b | MIMAT0000770 | 17761882 |
| Mesenchymal Stem Cells | bta-miR-130a | MIMAT0009223 | 17855557 |
| Mesenchymal Stem Cells | cfa-miR-130a | MIMAT0006631 | 17855557 |
| Mesenchymal Stem Cells | dre-miR-130a | MIMAT0001826 | 17855557 |
| Mesenchymal Stem Cells | hsa-miR-100-5p | MIMAT0000098 | 22684006 |
| Mesenchymal Stem Cells | hsa-miR-125b-5p | MIMAT0000423 | 18230348 |
| Mesenchymal Stem Cells | hsa-miR-130a-3p | MIMAT0000425 | 17855557 |
| Mesenchymal Stem Cells | hsa-miR-133a-3p | MIMAT0000427 | 23069713 |
| Mesenchymal Stem Cells | hsa-miR-138-5p | MIMAT0000430 | 20486779 |
| Mesenchymal Stem Cells | hsa-miR-145-5p | MIMAT0000437 | 20382729 |
| Mesenchymal Stem Cells | hsa-miR-145-5p | MIMAT0000437 | 21217773 |
| Mesenchymal Stem Cells | hsa-miR-196a-5p | MIMAT0000226 | 19063684 |
| Mesenchymal Stem Cells | hsa-miR-199a-5p | MIMAT0000231 | 22441842 |
| Mesenchymal Stem Cells | hsa-miR-206 | MIMAT0000462 | 17855557 |
| Mesenchymal Stem Cells | hsa-miR-21-5p | MIMAT0000076 | 21381024 |
| Mesenchymal Stem Cells | hsa-miR-21-5p | MIMAT0000076 | 19816956 |
| Mesenchymal Stem Cells | hsa-miR-21-5p | MIMAT0000076 | 23239100 |
| Mesenchymal Stem Cells | hsa-miR-27a-3p | MIMAT0000084 | 19440384 |
| Mesenchymal Stem Cells | hsa-miR-29a-3p | MIMAT0000086 | 21665270 |
| Mesenchymal Stem Cells | hsa-miR-29b-3p | MIMAT0000100 | 21665270 |
| Mesenchymal Stem Cells | hsa-miR-302a-3p | MIMAT0000684 | 17855557 |
| Mesenchymal Stem Cells | hsa-miR-320a | MIMAT0000510 | 17855557 |
| Mesenchymal Stem Cells | hsa-miR-335-5p | MIMAT0000765 | 21164520 |
| Mesenchymal Stem Cells | hsa-miR-433-3p | MIMAT0001627 | 23353875 |
| Mesenchymal Stem Cells | hsa-miR-489-3p | MIMAT0002805 | 19440384 |
| Mesenchymal Stem Cells | hsa-miR-637 | MIMAT0003307 | 21880893 |
| Mesenchymal Stem Cells | mmu-miR-204-5p | MIMAT0000237 | 20039258 |
| Mesenchymal Stem Cells | mmu-miR-211-5p | MIMAT0000668 | 20039258 |
| Mesenchymal Stem Cells | mmu-miR-29a-3p | MIMAT0000535 | 21665270 |
| Mesenchymal Stem Cells | mmu-miR-29b-3p | MIMAT0000127 | 21665270 |
| Mesenchymal Stem Cells | mmu-miR-9-5p | MIMAT0000142 | 22465325 |
| Mesenchymal Stem Cells | ppy-miR-130a | MIMAT0015753 | 17855557 |
| Mesenchymal Stem Cells | ptr-miR-130a | MIMAT0008025 | 17855557 |
| Mesenchymal Stem Cells | ssc-miR-130a | MIMAT0007758 | 17855557 |
| Mesenchymal Stem Cells | xtr-miR-130a | MIMAT0003591 | 17855557 |
| Mesenteric Arteries | mmu-miR-130a-3p | MIMAT0000141 | 21753805 |
| Mesenteric Artery Superior | mmu-miR-130a-3p | MIMAT0000141 | 21753805 |
| Mesoderm | hsa-miR-155-5p | MIMAT0000646 | 19701459 |
| Mesoderm | mmu-miR-137-3p | MIMAT0000149 | 21256124 |
| Mesoderm | mmu-miR-153-3p | MIMAT0000163 | 21256124 |
| Mesoderm | mmu-miR-155-5p | MIMAT0000165 | 19701459 |
| Mesoderm | mmu-miR-21a-5p | MIMAT0000530 | 21295561 |
| Mesoderm | mmu-miR-290a-3p | MIMAT0004572 | 19628328 |
| Mesoderm | mmu-miR-291a-3p | MIMAT0000368 | 19628328 |
| Mesoderm | mmu-miR-292-3p | MIMAT0000370 | 19628328 |
| Mesoderm | mmu-miR-293-3p | MIMAT0000371 | 19628328 |
| Mesoderm | mmu-miR-294-3p | MIMAT0000372 | 19628328 |
| Mesoderm | mmu-miR-295-3p | MIMAT0000373 | 19628328 |
| Mesoderm | mmu-miR-363-3p | MIMAT0000708 | 21256124 |
| Microfilaments | hsa-miR-1 | MIMAT0000416 | 23142026 |
| Microfilaments | mmu-miR-124-3p | MIMAT0000134 | 18619591 |
| Microglia | hsa-miR-146a-5p | MIMAT0000449 | 20181935 |
| Microglia | mmu-miR-124-3p | MIMAT0000134 | 21131957 |
| Microglia | mmu-miR-155-5p | MIMAT0000165 | 22043967 |
| Microtubules | mmu-miR-124-3p | MIMAT0000134 | 18619591 |
| Microvessels | hsa-miR-135b-5p | MIMAT0000758 | 23340180 |
| Microvessels | hsa-miR-223-3p | MIMAT0000280 | 23208072 |
| Microvessels | hsa-miR-29b-3p | MIMAT0000100 | 21793034 |
| Microvessels | mmu-miR-15a-5p | MIMAT0000526 | 20445066 |
| Middle Cerebral Artery | mmu-miR-497-5p | MIMAT0003453 | 20053374 |
| Middle Cerebral Artery | rno-let-7a-5p | MIMAT0000774 | 18258830 |
| Middle Cerebral Artery | rno-let-7b-3p | MIMAT0004705 | 18258830 |
| Middle Cerebral Artery | rno-let-7b-5p | MIMAT0000775 | 18258830 |
| Middle Cerebral Artery | rno-let-7c-5p | MIMAT0000776 | 18258830 |
| Middle Cerebral Artery | rno-let-7d-3p | MIMAT0000563 | 18258830 |
| Middle Cerebral Artery | rno-let-7d-5p | MIMAT0000562 | 18258830 |
| Middle Cerebral Artery | rno-let-7e-3p | MIMAT0004706 | 18258830 |
| Middle Cerebral Artery | rno-let-7e-5p | MIMAT0000777 | 18258830 |
| Middle Cerebral Artery | rno-let-7f-5p | MIMAT0000778 | 18258830 |
| Middle Cerebral Artery | rno-let-7i-3p | MIMAT0004707 | 18258830 |
| Middle Cerebral Artery | rno-let-7i-5p | MIMAT0000779 | 18258830 |
| Middle Cerebral Artery | rno-miR-100-5p | MIMAT0000822 | 18258830 |
| Middle Cerebral Artery | rno-miR-101a-3p | MIMAT0000823 | 18258830 |
| Middle Cerebral Artery | rno-miR-101b-3p | MIMAT0000615 | 18258830 |
| Middle Cerebral Artery | rno-miR-124-3p | MIMAT0000828 | 18258830 |
| Middle Cerebral Artery | rno-miR-125a-5p | MIMAT0000829 | 18258830 |
| Middle Cerebral Artery | rno-miR-129-5p | MIMAT0000600 | 18258830 |
| Middle Cerebral Artery | rno-miR-130a-3p | MIMAT0000836 | 18258830 |
| Middle Cerebral Artery | rno-miR-132-3p | MIMAT0000838 | 18258830 |
| Middle Cerebral Artery | rno-miR-134-5p | MIMAT0000840 | 18258830 |
| Middle Cerebral Artery | rno-miR-138-5p | MIMAT0000844 | 18258830 |
| Middle Cerebral Artery | rno-miR-139-5p | MIMAT0000845 | 18258830 |
| Middle Cerebral Artery | rno-miR-145-5p | MIMAT0000851 | 19142192 |
| Middle Cerebral Artery | rno-miR-150-5p | MIMAT0000853 | 18258830 |
| Middle Cerebral Artery | rno-miR-181b-5p | MIMAT0000859 | 18258830 |
| Middle Cerebral Artery | rno-miR-185-5p | MIMAT0000862 | 18258830 |
| Middle Cerebral Artery | rno-miR-204-5p | MIMAT0000877 | 18258830 |
| Middle Cerebral Artery | rno-miR-21-5p | MIMAT0000790 | 18258830 |
| Middle Cerebral Artery | rno-miR-214-3p | MIMAT0000885 | 18258830 |
| Middle Cerebral Artery | rno-miR-215 | MIMAT0003118 | 18258830 |
| Middle Cerebral Artery | rno-miR-218a-5p | MIMAT0000888 | 18258830 |
| Middle Cerebral Artery | rno-miR-223-3p | MIMAT0000892 | 18258830 |
| Middle Cerebral Artery | rno-miR-23a-3p | MIMAT0000792 | 18258830 |
| Middle Cerebral Artery | rno-miR-23b-3p | MIMAT0000793 | 18258830 |
| Middle Cerebral Artery | rno-miR-24-3p | MIMAT0000794 | 18258830 |
| Middle Cerebral Artery | rno-miR-25-3p | MIMAT0000795 | 18258830 |
| Middle Cerebral Artery | rno-miR-26b-5p | MIMAT0000797 | 18258830 |
| Middle Cerebral Artery | rno-miR-27a-3p | MIMAT0000799 | 18258830 |
| Middle Cerebral Artery | rno-miR-290 | MIMAT0000893 | 18258830 |
| Middle Cerebral Artery | rno-miR-292-5p | MIMAT0000896 | 18258830 |
| Middle Cerebral Artery | rno-miR-293-5p | MIMAT0012847 | 18258830 |
| Middle Cerebral Artery | rno-miR-298-5p | MIMAT0000900 | 18258830 |
| Middle Cerebral Artery | rno-miR-29a-3p | MIMAT0000802 | 18258830 |
| Middle Cerebral Artery | rno-miR-29b-3p | MIMAT0000801 | 18258830 |
| Middle Cerebral Artery | rno-miR-29c-3p | MIMAT0000803 | 18258830 |
| Middle Cerebral Artery | rno-miR-301a-3p | MIMAT0000552 | 18258830 |
| Middle Cerebral Artery | rno-miR-30a-3p | MIMAT0000809 | 18258830 |
| Middle Cerebral Artery | rno-miR-30a-5p | MIMAT0000808 | 18258830 |
| Middle Cerebral Artery | rno-miR-30b-5p | MIMAT0000806 | 18258830 |
| Middle Cerebral Artery | rno-miR-30c-5p | MIMAT0000804 | 18258830 |
| Middle Cerebral Artery | rno-miR-30e-5p | MIMAT0000805 | 18258830 |
| Middle Cerebral Artery | rno-miR-320-3p | MIMAT0000903 | 18258830 |
| Middle Cerebral Artery | rno-miR-322-5p | MIMAT0001619 | 18258830 |
| Middle Cerebral Artery | rno-miR-324-5p | MIMAT0000553 | 18258830 |
| Middle Cerebral Artery | rno-miR-327 | MIMAT0000561 | 18258830 |
| Middle Cerebral Artery | rno-miR-328a-3p | MIMAT0000564 | 18258830 |
| Middle Cerebral Artery | rno-miR-331-3p | MIMAT0000570 | 18258830 |
| Middle Cerebral Artery | rno-miR-338-3p | MIMAT0000581 | 18258830 |
| Middle Cerebral Artery | rno-miR-342-3p | MIMAT0000589 | 18258830 |
| Middle Cerebral Artery | rno-miR-342-5p | MIMAT0004652 | 18258830 |
| Middle Cerebral Artery | rno-miR-34a-5p | MIMAT0000815 | 18258830 |
| Middle Cerebral Artery | rno-miR-374-5p | MIMAT0003208 | 18258830 |
| Middle Cerebral Artery | rno-miR-382-5p | MIMAT0003201 | 18258830 |
| Middle Cerebral Artery | rno-miR-383-5p | MIMAT0003114 | 18258830 |
| Middle Cerebral Artery | rno-miR-409a-3p | MIMAT0003205 | 18258830 |
| Middle Cerebral Artery | rno-miR-485-5p | MIMAT0003203 | 18258830 |
| Middle Cerebral Artery | rno-miR-494-3p | MIMAT0003193 | 18258830 |
| Middle Cerebral Artery | rno-miR-497-5p | MIMAT0003383 | 18258830 |
| Middle Cerebral Artery | rno-miR-543-5p | MIMAT0004787 | 18258830 |
| Middle Cerebral Artery | rno-miR-664-3p | MIMAT0003382 | 18258830 |
| Middle Cerebral Artery | rno-miR-7a-5p | MIMAT0000606 | 18258830 |
| Middle Cerebral Artery | rno-miR-92a-3p | MIMAT0000816 | 18258830 |
| Middle Cerebral Artery | rno-miR-98-5p | MIMAT0000819 | 18258830 |
| Middle Cerebral Artery | rno-miR-99a-5p | MIMAT0000820 | 18258830 |
| Middle Cerebral Artery | rno-miR-99b-5p | MIMAT0000821 | 18258830 |
| Middle Cerebral Artery | rno-miR-9a-5p | MIMAT0000781 | 18258830 |
| Milk | mmu-miR-101a-3p | MIMAT0000133 | 19281778 |
| Mitochondria | hsa-miR-27a-3p | MIMAT0000084 | 19513126 |
| Mitochondria | mmu-miR-15b-5p | MIMAT0000124 | 20007690 |
| Mitochondria | mmu-miR-16-5p | MIMAT0000527 | 20007690 |
| Mitochondria | mmu-miR-195a-5p | MIMAT0000225 | 20007690 |
| Mitochondria | mmu-miR-322-5p | MIMAT0000548 | 20007690 |
| Mitochondria | mmu-miR-696 | MIMAT0003483 | 20086200 |
| Mitochondria | rno-miR-15b-5p | MIMAT0000784 | 20007690 |
| Mitochondria | rno-miR-16-5p | MIMAT0000785 | 20007690 |
| Mitochondria | rno-miR-195-5p | MIMAT0000870 | 20007690 |
| Mitochondria | rno-miR-214-3p | MIMAT0000885 | 20007690 |
| Mitochondria | rno-miR-322-5p | MIMAT0001619 | 20007690 |
| Mitochondria | rno-miR-499-5p | MIMAT0003381 | 21186368 |
| Mitochondrial Membranes | rno-miR-1-3p | MIMAT0003125 | 18801338 |
| Monocytes | hsa-miR-146a-5p | MIMAT0000449 | 20375304 |
| Monocytes | hsa-miR-146a-5p | MIMAT0000449 | 21178010 |
| Monocytes | hsa-miR-146a-5p | MIMAT0000449 | 19918258 |
| Monocytes | hsa-miR-146a-5p | MIMAT0000449 | 16885212 |
| Monocytes | hsa-miR-146b-5p | MIMAT0002809 | 16885212 |
| Monocytes | hsa-miR-155-5p | MIMAT0000646 | 21030878 |
| Monocytes | hsa-miR-155-5p | MIMAT0000646 | 19887047 |
| Monocytes | hsa-miR-155-5p | MIMAT0000646 | 19289835 |
| Monocytes | hsa-miR-195-5p | MIMAT0000461 | 20952681 |
| Monocytes | hsa-miR-198 | MIMAT0000228 | 19148268 |
| Monocytes | hsa-miR-214-3p | MIMAT0000271 | 21228352 |
| Monocytes | hsa-miR-663a | MIMAT0003326 | 20622002 |
| Monocytes | hsa-miR-9-5p | MIMAT0000441 | 19289835 |
| Monocytes | mmu-miR-124-3p | MIMAT0000134 | 21131957 |
| Motor Neurons | mmu-miR-128-3p | MIMAT0000140 | 21248104 |
| Motor Neurons | mmu-miR-17-5p | MIMAT0000649 | 21248104 |
| Motor Neurons | mmu-miR-206-3p | MIMAT0000239 | 20007902 |
| Mouth Mucosa | hsa-miR-137 | MIMAT0000429 | 18381414 |
| Mouth Mucosa | hsa-miR-193a-3p | MIMAT0000459 | 18381414 |
| Mouth Mucosa | hsa-miR-221-3p | MIMAT0000278 | 21226887 |
| Mouth Mucosa | hsa-miR-222-3p | MIMAT0000279 | 21226887 |
| Mucous Membrane | hsa-miR-137 | MIMAT0000429 | 20682795 |
| Mucous Membrane | hsa-miR-146a-5p | MIMAT0000449 | 20542134 |
| Mucous Membrane | hsa-miR-155-5p | MIMAT0000646 | 19650740 |
| Mucous Membrane | hsa-miR-195-5p | MIMAT0000461 | 20727858 |
| Mucous Membrane | hsa-miR-196a-5p | MIMAT0000226 | 19342367 |
| Mucous Membrane | hsa-miR-196a-5p | MIMAT0000226 | 19418581 |
| Mucous Membrane | hsa-miR-21-5p | MIMAT0000076 | 19509156 |
| Mucous Membrane | hsa-miR-21-5p | MIMAT0000076 | 21468550 |
| Mucous Membrane | hsa-miR-218-5p | MIMAT0000275 | 19890957 |
| Mucous Membrane | hsa-miR-221-3p | MIMAT0000278 | 21236259 |
| Mucous Membrane | hsa-miR-222-3p | MIMAT0000279 | 22321642 |
| Mucous Membrane | hsa-miR-223-3p | MIMAT0000280 | 22270966 |
| Mucous Membrane | hsa-miR-25-3p | MIMAT0000081 | 23435373 |
| Mucous Membrane | hsa-miR-34b-3p | MIMAT0004676 | 20924086 |
| Mucous Membrane | hsa-miR-34c-5p | MIMAT0000686 | 20924086 |
| Mucous Membrane | hsa-miR-365a-3p | MIMAT0000710 | 22072615 |
| Mucous Membrane | hsa-miR-630 | MIMAT0003299 | 23435373 |
| Mucus | hsa-let-7d-5p | MIMAT0000065 | 21616524 |
| Mucus | hsa-let-7f-5p | MIMAT0000067 | 21616524 |
| Mucus | hsa-let-7g-5p | MIMAT0000414 | 21616524 |
| Mucus | hsa-let-7i-5p | MIMAT0000415 | 21616524 |
| Mucus | hsa-miR-98-5p | MIMAT0000096 | 21616524 |
| Multipotent Stem Cells | mmu-miR-143-3p | MIMAT0000247 | 19578358 |
| Multipotent Stem Cells | mmu-miR-145a-5p | MIMAT0000157 | 19578358 |
| Muscle Cells | hsa-miR-1 | MIMAT0000416 | 19131648 |
| Muscle Cells | hsa-miR-1 | MIMAT0000416 | 20458751 |
| Muscle Cells | hsa-miR-1 | MIMAT0000416 | 21051663 |
| Muscle Cells | hsa-miR-1 | MIMAT0000416 | 19775284 |
| Muscle Cells | hsa-miR-101-3p | MIMAT0000099 | 19818710 |
| Muscle Cells | hsa-miR-125b-5p | MIMAT0000423 | 21200031 |
| Muscle Cells | hsa-miR-133a-3p | MIMAT0000427 | 17344217 |
| Muscle Cells | hsa-miR-133a-3p | MIMAT0000427 | 19720047 |
| Muscle Cells | hsa-miR-133b | MIMAT0000770 | 17344217 |
| Muscle Cells | hsa-miR-133b | MIMAT0000770 | 19720047 |
| Muscle Cells | hsa-miR-150-5p | MIMAT0000451 | 21200031 |
| Muscle Cells | hsa-miR-155-5p | MIMAT0000646 | 17588946 |
| Muscle Cells | hsa-miR-155-5p | MIMAT0000646 | 21310411 |
| Muscle Cells | hsa-miR-195-5p | MIMAT0000461 | 22802111 |
| Muscle Cells | hsa-miR-199a-5p | MIMAT0000231 | 19818710 |
| Muscle Cells | hsa-miR-204-5p | MIMAT0000265 | 22871591 |
| Muscle Cells | hsa-miR-21-5p | MIMAT0000076 | 17478730 |
| Muscle Cells | hsa-miR-21-5p | MIMAT0000076 | 19906824 |
| Muscle Cells | hsa-miR-21-5p | MIMAT0000076 | 20219857 |
| Muscle Cells | hsa-miR-21-5p | MIMAT0000076 | 22034194 |
| Muscle Cells | hsa-miR-21-5p | MIMAT0000076 | 20693317 |
| Muscle Cells | hsa-miR-214-3p | MIMAT0000271 | 19818710 |
| Muscle Cells | hsa-miR-22-3p | MIMAT0000077 | 22538858 |
| Muscle Cells | hsa-miR-221-3p | MIMAT0000278 | 19088079 |
| Muscle Cells | hsa-miR-221-3p | MIMAT0000278 | 19150885 |
| Muscle Cells | hsa-miR-221-3p | MIMAT0000278 | 19859555 |
| Muscle Cells | hsa-miR-222-3p | MIMAT0000279 | 19150885 |
| Muscle Cells | hsa-miR-222-3p | MIMAT0000279 | 19859555 |
| Muscle Cells | hsa-miR-25-3p | MIMAT0000081 | 19541842 |
| Muscle Cells | hsa-miR-26a-5p | MIMAT0000082 | 18281287 |
| Muscle Cells | hsa-miR-26a-5p | MIMAT0000082 | 20857419 |
| Muscle Cells | hsa-miR-26a-5p | MIMAT0000082 | 20525681 |
| Muscle Cells | hsa-miR-27a-3p | MIMAT0000084 | 19666532 |
| Muscle Cells | hsa-miR-27a-3p | MIMAT0000084 | 21149577 |
| Muscle Cells | hsa-miR-27b-3p | MIMAT0000419 | 19666532 |
| Muscle Cells | hsa-miR-31-5p | MIMAT0000089 | 23518389 |
| Muscle Cells | hsa-miR-638 | MIMAT0003308 | 23554459 |
| Muscle Cells | hsa-miR-98-5p | MIMAT0000096 | 19818710 |
| Muscle Cells | mmu-miR-100-3p | MIMAT0017051 | 21339483 |
| Muscle Cells | mmu-miR-100-5p | MIMAT0000655 | 21339483 |
| Muscle Cells | mmu-miR-10a-3p | MIMAT0004659 | 20118242 |
| Muscle Cells | mmu-miR-10a-5p | MIMAT0000648 | 20118242 |
| Muscle Cells | mmu-miR-125b-5p | MIMAT0000136 | 21200031 |
| Muscle Cells | mmu-miR-125b-5p | MIMAT0000136 | 20699419 |
| Muscle Cells | mmu-miR-130a-3p | MIMAT0000141 | 21753805 |
| Muscle Cells | mmu-miR-143-3p | MIMAT0000247 | 20489207 |
| Muscle Cells | mmu-miR-143-3p | MIMAT0000247 | 19578358 |
| Muscle Cells | mmu-miR-143-3p | MIMAT0000247 | 20351064 |
| Muscle Cells | mmu-miR-145a-5p | MIMAT0000157 | 19578358 |
| Muscle Cells | mmu-miR-145a-5p | MIMAT0000157 | 20351064 |
| Muscle Cells | mmu-miR-15b-5p | MIMAT0000124 | 20007690 |
| Muscle Cells | mmu-miR-16-5p | MIMAT0000527 | 20007690 |
| Muscle Cells | mmu-miR-195a-5p | MIMAT0000225 | 20007690 |
| Muscle Cells | mmu-miR-1a-3p | MIMAT0000123 | 19933931 |
| Muscle Cells | mmu-miR-1a-3p | MIMAT0000123 | 20799856 |
| Muscle Cells | mmu-miR-214-3p | MIMAT0000661 | 19818710 |
| Muscle Cells | mmu-miR-21a-5p | MIMAT0000530 | 20404348 |
| Muscle Cells | mmu-miR-26a-5p | MIMAT0000533 | 18281287 |
| Muscle Cells | mmu-miR-322-5p | MIMAT0000548 | 20007690 |
| Muscle Cells | mmu-miR-486-5p | MIMAT0003130 | 20142475 |
| Muscle Cells | mmu-miR-494-3p | MIMAT0003182 | 20837890 |
| Muscle Cells | mmu-miR-696 | MIMAT0003483 | 20086200 |
| Muscle Cells | rno-miR-1-3p | MIMAT0003125 | 19775284 |
| Muscle Cells | rno-miR-133a-3p | MIMAT0000839 | 19720047 |
| Muscle Cells | rno-miR-133b-3p | MIMAT0003126 | 19720047 |
| Muscle Cells | rno-miR-145-5p | MIMAT0000851 | 19542014 |
| Muscle Cells | rno-miR-15b-5p | MIMAT0000784 | 20007690 |
| Muscle Cells | rno-miR-16-5p | MIMAT0000785 | 20007690 |
| Muscle Cells | rno-miR-195-5p | MIMAT0000870 | 20007690 |
| Muscle Cells | rno-miR-208a-3p | MIMAT0000880 | 21720271 |
| Muscle Cells | rno-miR-21-5p | MIMAT0000790 | 17478730 |
| Muscle Cells | rno-miR-21-5p | MIMAT0000790 | 19706597 |
| Muscle Cells | rno-miR-21-5p | MIMAT0000790 | 19336275 |
| Muscle Cells | rno-miR-21-5p | MIMAT0000790 | 19158092 |
| Muscle Cells | rno-miR-214-3p | MIMAT0000885 | 20007690 |
| Muscle Cells | rno-miR-221-3p | MIMAT0000890 | 19150885 |
| Muscle Cells | rno-miR-222-3p | MIMAT0000891 | 19150885 |
| Muscle Cells | rno-miR-27a-3p | MIMAT0000799 | 21149577 |
| Muscle Cells | rno-miR-31a-5p | MIMAT0000810 | 19542014 |
| Muscle Cells | rno-miR-31a-5p | MIMAT0000810 | 22020941 |
| Muscle Cells | rno-miR-322-5p | MIMAT0001619 | 20007690 |
| Muscle Fibers Skeletal | hsa-miR-133b | MIMAT0000770 | 17210790 |
| Muscle Fibers Skeletal | hsa-miR-221-3p | MIMAT0000278 | 19859555 |
| Muscle Fibers Skeletal | hsa-miR-222-3p | MIMAT0000279 | 19859555 |
| Muscle Fibers Skeletal | hsa-miR-26a-5p | MIMAT0000082 | 18281287 |
| Muscle Fibers Skeletal | mmu-miR-133b-3p | MIMAT0000769 | 17210790 |
| Muscle Fibers Skeletal | mmu-miR-206-3p | MIMAT0000239 | 21041476 |
| Muscle Fibers Skeletal | mmu-miR-206-3p | MIMAT0000239 | 20007902 |
| Muscle Fibers Skeletal | mmu-miR-26a-5p | MIMAT0000533 | 18281287 |
| Muscle Fibers Skeletal | mmu-miR-486-5p | MIMAT0003130 | 21041476 |
| Muscle Skeletal | bta-miR-29a | MIMAT0003518 | 17652184 |
| Muscle Skeletal | bta-miR-29c | MIMAT0003829 | 17652184 |
| Muscle Skeletal | cfa-miR-29a | MIMAT0006626 | 17652184 |
| Muscle Skeletal | cfa-miR-29c | MIMAT0006705 | 17652184 |
| Muscle Skeletal | dre-miR-29a | MIMAT0001802 | 17652184 |
| Muscle Skeletal | hsa-miR-1 | MIMAT0000416 | 15951802 |
| Muscle Skeletal | hsa-miR-1 | MIMAT0000416 | 21169019 |
| Muscle Skeletal | hsa-miR-1 | MIMAT0000416 | 20956382 |
| Muscle Skeletal | hsa-miR-1 | MIMAT0000416 | 19710019 |
| Muscle Skeletal | hsa-miR-1 | MIMAT0000416 | 20458751 |
| Muscle Skeletal | hsa-miR-101-3p | MIMAT0000099 | 19818710 |
| Muscle Skeletal | hsa-miR-199a-5p | MIMAT0000231 | 19818710 |
| Muscle Skeletal | hsa-miR-206 | MIMAT0000462 | 20956382 |
| Muscle Skeletal | hsa-miR-206 | MIMAT0000462 | 19710019 |
| Muscle Skeletal | hsa-miR-206 | MIMAT0000462 | 19620785 |
| Muscle Skeletal | hsa-miR-206 | MIMAT0000462 | 17030984 |
| Muscle Skeletal | hsa-miR-214-3p | MIMAT0000271 | 19818710 |
| Muscle Skeletal | hsa-miR-221-3p | MIMAT0000278 | 19859555 |
| Muscle Skeletal | hsa-miR-222-3p | MIMAT0000279 | 19859555 |
| Muscle Skeletal | hsa-miR-26a-5p | MIMAT0000082 | 18281287 |
| Muscle Skeletal | hsa-miR-27a-3p | MIMAT0000084 | 19666532 |
| Muscle Skeletal | hsa-miR-27b-3p | MIMAT0000419 | 19666532 |
| Muscle Skeletal | hsa-miR-29a-3p | MIMAT0000086 | 21169019 |
| Muscle Skeletal | hsa-miR-98-5p | MIMAT0000096 | 19818710 |
| Muscle Skeletal | mmu-miR-133a-3p | MIMAT0000145 | 16380711 |
| Muscle Skeletal | mmu-miR-133a-3p | MIMAT0000145 | 19073597 |
| Muscle Skeletal | mmu-miR-1a-3p | MIMAT0000123 | 19933931 |
| Muscle Skeletal | mmu-miR-1a-3p | MIMAT0000123 | 20799856 |
| Muscle Skeletal | mmu-miR-1a-3p | MIMAT0000123 | 15951802 |
| Muscle Skeletal | mmu-miR-1a-3p | MIMAT0000123 | 20819939 |
| Muscle Skeletal | mmu-miR-1a-3p | MIMAT0000123 | 16380711 |
| Muscle Skeletal | mmu-miR-1a-3p | MIMAT0000123 | 19073597 |
| Muscle Skeletal | mmu-miR-206-3p | MIMAT0000239 | 17030984 |
| Muscle Skeletal | mmu-miR-206-3p | MIMAT0000239 | 20007902 |
| Muscle Skeletal | mmu-miR-206-3p | MIMAT0000239 | 20819939 |
| Muscle Skeletal | mmu-miR-210-3p | MIMAT0000658 | 19073597 |
| Muscle Skeletal | mmu-miR-214-3p | MIMAT0000661 | 19818710 |
| Muscle Skeletal | mmu-miR-26a-5p | MIMAT0000533 | 18281287 |
| Muscle Skeletal | mmu-miR-29a-3p | MIMAT0000535 | 17652184 |
| Muscle Skeletal | mmu-miR-29b-3p | MIMAT0000127 | 17652184 |
| Muscle Skeletal | mmu-miR-29c-3p | MIMAT0000536 | 17652184 |
| Muscle Skeletal | mmu-miR-696 | MIMAT0003483 | 20086200 |
| Muscle Skeletal | ppy-miR-29a | MIMAT0002363 | 17652184 |
| Muscle Skeletal | ppy-miR-29c | MIMAT0015735 | 17652184 |
| Muscle Skeletal | ptr-miR-29a | MIMAT0002364 | 17652184 |
| Muscle Skeletal | ptr-miR-29c | MIMAT0008082 | 17652184 |
| Muscle Skeletal | rno-miR-24-3p | MIMAT0000794 | 19499150 |
| Muscle Skeletal | rno-miR-29a-3p | MIMAT0000802 | 17652184 |
| Muscle Skeletal | rno-miR-29b-3p | MIMAT0000801 | 17652184 |
| Muscle Skeletal | rno-miR-29c-3p | MIMAT0000803 | 17652184 |
| Muscle Skeletal | ssc-miR-29a | MIMAT0013870 | 17652184 |
| Muscle Skeletal | ssc-miR-29c | MIMAT0002166 | 17652184 |
| Muscle Skeletal | xtr-miR-29a | MIMAT0003656 | 17652184 |
| Muscle Smooth | hsa-miR-1 | MIMAT0000416 | 20458751 |
| Muscle Smooth | hsa-miR-1 | MIMAT0000416 | 21051663 |
| Muscle Smooth | hsa-miR-155-5p | MIMAT0000646 | 17588946 |
| Muscle Smooth | hsa-miR-155-5p | MIMAT0000646 | 21310411 |
| Muscle Smooth | hsa-miR-195-5p | MIMAT0000461 | 22802111 |
| Muscle Smooth | hsa-miR-204-5p | MIMAT0000265 | 22871591 |
| Muscle Smooth | hsa-miR-21-5p | MIMAT0000076 | 20693317 |
| Muscle Smooth | hsa-miR-21-5p | MIMAT0000076 | 17478730 |
| Muscle Smooth | hsa-miR-21-5p | MIMAT0000076 | 19906824 |
| Muscle Smooth | hsa-miR-21-5p | MIMAT0000076 | 22034194 |
| Muscle Smooth | hsa-miR-22-3p | MIMAT0000077 | 22538858 |
| Muscle Smooth | hsa-miR-221-3p | MIMAT0000278 | 19088079 |
| Muscle Smooth | hsa-miR-221-3p | MIMAT0000278 | 19150885 |
| Muscle Smooth | hsa-miR-222-3p | MIMAT0000279 | 19150885 |
| Muscle Smooth | hsa-miR-25-3p | MIMAT0000081 | 19541842 |
| Muscle Smooth | hsa-miR-26a-5p | MIMAT0000082 | 20857419 |
| Muscle Smooth | hsa-miR-26a-5p | MIMAT0000082 | 20525681 |
| Muscle Smooth | hsa-miR-31-5p | MIMAT0000089 | 23518389 |
| Muscle Smooth | hsa-miR-638 | MIMAT0003308 | 23554459 |
| Muscle Smooth | mmu-miR-100-3p | MIMAT0017051 | 21339483 |
| Muscle Smooth | mmu-miR-100-5p | MIMAT0000655 | 21339483 |
| Muscle Smooth | mmu-miR-10a-3p | MIMAT0004659 | 20118242 |
| Muscle Smooth | mmu-miR-10a-5p | MIMAT0000648 | 20118242 |
| Muscle Smooth | mmu-miR-125b-5p | MIMAT0000136 | 20699419 |
| Muscle Smooth | mmu-miR-130a-3p | MIMAT0000141 | 21753805 |
| Muscle Smooth | mmu-miR-143-3p | MIMAT0000247 | 20351064 |
| Muscle Smooth | mmu-miR-143-3p | MIMAT0000247 | 20489207 |
| Muscle Smooth | mmu-miR-143-3p | MIMAT0000247 | 19578358 |
| Muscle Smooth | mmu-miR-145a-5p | MIMAT0000157 | 19578358 |
| Muscle Smooth | mmu-miR-145a-5p | MIMAT0000157 | 20351064 |
| Muscle Smooth | mmu-miR-1a-3p | MIMAT0000123 | 20799856 |
| Muscle Smooth | rno-miR-145-5p | MIMAT0000851 | 19542014 |
| Muscle Smooth | rno-miR-150-5p | MIMAT0000853 | 19892940 |
| Muscle Smooth | rno-miR-194-5p | MIMAT0000869 | 19892940 |
| Muscle Smooth | rno-miR-208a-3p | MIMAT0000880 | 21720271 |
| Muscle Smooth | rno-miR-21-5p | MIMAT0000790 | 17478730 |
| Muscle Smooth | rno-miR-21-5p | MIMAT0000790 | 19158092 |
| Muscle Smooth | rno-miR-221-3p | MIMAT0000890 | 19150885 |
| Muscle Smooth | rno-miR-222-3p | MIMAT0000891 | 19150885 |
| Muscle Smooth | rno-miR-31a-5p | MIMAT0000810 | 19542014 |
| Muscle Smooth | rno-miR-31a-5p | MIMAT0000810 | 22020941 |
| Muscle Smooth Vascular | hsa-miR-155-5p | MIMAT0000646 | 17588946 |
| Muscle Smooth Vascular | hsa-miR-195-5p | MIMAT0000461 | 22802111 |
| Muscle Smooth Vascular | hsa-miR-204-5p | MIMAT0000265 | 22871591 |
| Muscle Smooth Vascular | hsa-miR-21-5p | MIMAT0000076 | 22034194 |
| Muscle Smooth Vascular | hsa-miR-21-5p | MIMAT0000076 | 20693317 |
| Muscle Smooth Vascular | hsa-miR-221-3p | MIMAT0000278 | 19088079 |
| Muscle Smooth Vascular | hsa-miR-221-3p | MIMAT0000278 | 19150885 |
| Muscle Smooth Vascular | hsa-miR-222-3p | MIMAT0000279 | 19150885 |
| Muscle Smooth Vascular | hsa-miR-31-5p | MIMAT0000089 | 23518389 |
| Muscle Smooth Vascular | hsa-miR-638 | MIMAT0003308 | 23554459 |
| Muscle Smooth Vascular | mmu-miR-100-3p | MIMAT0017051 | 21339483 |
| Muscle Smooth Vascular | mmu-miR-100-5p | MIMAT0000655 | 21339483 |
| Muscle Smooth Vascular | mmu-miR-125b-5p | MIMAT0000136 | 20699419 |
| Muscle Smooth Vascular | mmu-miR-130a-3p | MIMAT0000141 | 21753805 |
| Muscle Smooth Vascular | mmu-miR-143-3p | MIMAT0000247 | 19578358 |
| Muscle Smooth Vascular | mmu-miR-145a-5p | MIMAT0000157 | 19578358 |
| Muscle Smooth Vascular | rno-miR-145-5p | MIMAT0000851 | 19542014 |
| Muscle Smooth Vascular | rno-miR-208a-3p | MIMAT0000880 | 21720271 |
| Muscle Smooth Vascular | rno-miR-21-5p | MIMAT0000790 | 19158092 |
| Muscle Smooth Vascular | rno-miR-221-3p | MIMAT0000890 | 19150885 |
| Muscle Smooth Vascular | rno-miR-222-3p | MIMAT0000891 | 19150885 |
| Muscle Smooth Vascular | rno-miR-31a-5p | MIMAT0000810 | 19542014 |
| Muscle Smooth Vascular | rno-miR-31a-5p | MIMAT0000810 | 22020941 |
| Muscles | bta-miR-29a | MIMAT0003518 | 17652184 |
| Muscles | bta-miR-29c | MIMAT0003829 | 17652184 |
| Muscles | cfa-miR-29a | MIMAT0006626 | 17652184 |
| Muscles | cfa-miR-29c | MIMAT0006705 | 17652184 |
| Muscles | dre-miR-29a | MIMAT0001802 | 17652184 |
| Muscles | hsa-miR-1 | MIMAT0000416 | 21169019 |
| Muscles | hsa-miR-1 | MIMAT0000416 | 19506341 |
| Muscles | hsa-miR-1 | MIMAT0000416 | 19710019 |
| Muscles | hsa-miR-125b-5p | MIMAT0000423 | 21200031 |
| Muscles | hsa-miR-146a-5p | MIMAT0000449 | 21968601 |
| Muscles | hsa-miR-150-5p | MIMAT0000451 | 21200031 |
| Muscles | hsa-miR-195-5p | MIMAT0000461 | 22802111 |
| Muscles | hsa-miR-204-5p | MIMAT0000265 | 22871591 |
| Muscles | hsa-miR-206 | MIMAT0000462 | 19710019 |
| Muscles | hsa-miR-21-5p | MIMAT0000076 | 22034194 |
| Muscles | hsa-miR-22-3p | MIMAT0000077 | 22538858 |
| Muscles | hsa-miR-222-3p | MIMAT0000279 | 23447020 |
| Muscles | hsa-miR-26a-5p | MIMAT0000082 | 20857419 |
| Muscles | hsa-miR-29a-3p | MIMAT0000086 | 21169019 |
| Muscles | hsa-miR-31-5p | MIMAT0000089 | 23518389 |
| Muscles | hsa-miR-378a-3p | MIMAT0000732 | 21471220 |
| Muscles | hsa-miR-503-5p | MIMAT0002874 | 21220732 |
| Muscles | hsa-miR-638 | MIMAT0003308 | 23554459 |
| Muscles | mmu-miR-100-3p | MIMAT0017051 | 21339483 |
| Muscles | mmu-miR-100-5p | MIMAT0000655 | 21339483 |
| Muscles | mmu-miR-125b-5p | MIMAT0000136 | 21200031 |
| Muscles | mmu-miR-128-3p | MIMAT0000140 | 21248104 |
| Muscles | mmu-miR-130a-3p | MIMAT0000141 | 21753805 |
| Muscles | mmu-miR-17-5p | MIMAT0000649 | 21248104 |
| Muscles | mmu-miR-206-3p | MIMAT0000239 | 20007902 |
| Muscles | mmu-miR-29a-3p | MIMAT0000535 | 17652184 |
| Muscles | mmu-miR-29b-3p | MIMAT0000127 | 17652184 |
| Muscles | mmu-miR-29c-3p | MIMAT0000536 | 17652184 |
| Muscles | ppy-miR-29a | MIMAT0002363 | 17652184 |
| Muscles | ppy-miR-29c | MIMAT0015735 | 17652184 |
| Muscles | ptr-miR-29a | MIMAT0002364 | 17652184 |
| Muscles | ptr-miR-29c | MIMAT0008082 | 17652184 |
| Muscles | rno-miR-1-3p | MIMAT0003125 | 19506341 |
| Muscles | rno-miR-146a-5p | MIMAT0000852 | 22735812 |
| Muscles | rno-miR-208a-3p | MIMAT0000880 | 21720271 |
| Muscles | rno-miR-21-5p | MIMAT0000790 | 20553627 |
| Muscles | rno-miR-29a-3p | MIMAT0000802 | 17652184 |
| Muscles | rno-miR-29b-3p | MIMAT0000801 | 17652184 |
| Muscles | rno-miR-29c-3p | MIMAT0000803 | 17652184 |
| Muscles | rno-miR-31a-5p | MIMAT0000810 | 22020941 |
| Muscles | ssc-miR-29a | MIMAT0013870 | 17652184 |
| Muscles | ssc-miR-29c | MIMAT0002166 | 17652184 |
| Muscles | xtr-miR-29a | MIMAT0003656 | 17652184 |
| Myelin Sheath | mmu-miR-219a-5p | MIMAT0000664 | 20223198 |
| Myelin Sheath | mmu-miR-23a-3p | MIMAT0000532 | 19259393 |
| Myelin Sheath | mmu-miR-23b-3p | MIMAT0000125 | 19259393 |
| Myelin Sheath | rno-miR-29a-3p | MIMAT0000802 | 19170179 |
| Myelin Sheath | rno-miR-9a-5p | MIMAT0000781 | 18987208 |
| Myeloid Cells | hsa-miR-155-5p | MIMAT0000646 | 21036908 |
| Myeloid Cells | hsa-miR-155-5p | MIMAT0000646 | 18299402 |
| Myeloid Cells | hsa-miR-223-3p | MIMAT0000280 | 20029046 |
| Myeloid Cells | hsa-miR-92a-3p | MIMAT0000092 | 19608627 |
| Myeloid Cells | mmu-miR-92a-3p | MIMAT0000539 | 19608627 |
| Myoblasts | hsa-miR-1 | MIMAT0000416 | 20956382 |
| Myoblasts | hsa-miR-125b-5p | MIMAT0000423 | 21200031 |
| Myoblasts | hsa-miR-133b | MIMAT0000770 | 17210790 |
| Myoblasts | hsa-miR-150-5p | MIMAT0000451 | 21200031 |
| Myoblasts | hsa-miR-181a-5p | MIMAT0000256 | 16489342 |
| Myoblasts | hsa-miR-206 | MIMAT0000462 | 20956382 |
| Myoblasts | hsa-miR-221-3p | MIMAT0000278 | 19859555 |
| Myoblasts | hsa-miR-222-3p | MIMAT0000279 | 19859555 |
| Myoblasts | hsa-miR-26a-5p | MIMAT0000082 | 18281287 |
| Myoblasts | hsa-miR-31-5p | MIMAT0000089 | 21212803 |
| Myoblasts | hsa-miR-378a-3p | MIMAT0000732 | 21471220 |
| Myoblasts | mmu-miR-125b-5p | MIMAT0000136 | 21200031 |
| Myoblasts | mmu-miR-133a-3p | MIMAT0000145 | 16380711 |
| Myoblasts | mmu-miR-133a-3p | MIMAT0000145 | 16923828 |
| Myoblasts | mmu-miR-133b-3p | MIMAT0000769 | 17210790 |
| Myoblasts | mmu-miR-137-3p | MIMAT0000149 | 20534588 |
| Myoblasts | mmu-miR-137-5p | MIMAT0016986 | 20534588 |
| Myoblasts | mmu-miR-181a-5p | MIMAT0000210 | 16489342 |
| Myoblasts | mmu-miR-1a-3p | MIMAT0000123 | 20819939 |
| Myoblasts | mmu-miR-1a-3p | MIMAT0000123 | 16380711 |
| Myoblasts | mmu-miR-1a-3p | MIMAT0000123 | 16923828 |
| Myoblasts | mmu-miR-206-3p | MIMAT0000239 | 21041476 |
| Myoblasts | mmu-miR-206-3p | MIMAT0000239 | 20819939 |
| Myoblasts | mmu-miR-206-3p | MIMAT0000239 | 16923828 |
| Myoblasts | mmu-miR-26a-5p | MIMAT0000533 | 18281287 |
| Myoblasts | mmu-miR-486-5p | MIMAT0003130 | 21041476 |
| Myocardium | hsa-miR-1 | MIMAT0000416 | 20081117 |
| Myocardium | hsa-miR-1 | MIMAT0000416 | 19506341 |
| Myocardium | hsa-miR-133a-3p | MIMAT0000427 | 19720047 |
| Myocardium | hsa-miR-133b | MIMAT0000770 | 19720047 |
| Myocardium | hsa-miR-155-5p | MIMAT0000646 | 20550618 |
| Myocardium | hsa-miR-499a-5p | MIMAT0002870 | 20081117 |
| Myocardium | hsa-miR-499b-5p | MIMAT0019897 | 20081117 |
| Myocardium | rno-miR-1-3p | MIMAT0003125 | 19506341 |
| Myocardium | rno-miR-133a-3p | MIMAT0000839 | 19720047 |
| Myocardium | rno-miR-133b-3p | MIMAT0003126 | 19720047 |
| Myocardium | rno-miR-31a-5p | MIMAT0000810 | 23270756 |
| Myocardium | rno-miR-384-5p | MIMAT0005309 | 23315007 |
| Myocytes Cardiac | hsa-miR-1 | MIMAT0000416 | 21051663 |
| Myocytes Cardiac | hsa-miR-1 | MIMAT0000416 | 15951802 |
| Myocytes Cardiac | hsa-miR-1 | MIMAT0000416 | 19188439 |
| Myocytes Cardiac | hsa-miR-1 | MIMAT0000416 | 23141496 |
| Myocytes Cardiac | hsa-miR-1 | MIMAT0000416 | 20571053 |
| Myocytes Cardiac | hsa-miR-1 | MIMAT0000416 | 20081117 |
| Myocytes Cardiac | hsa-miR-1 | MIMAT0000416 | 19506341 |
| Myocytes Cardiac | hsa-miR-126-3p | MIMAT0000445 | 20571053 |
| Myocytes Cardiac | hsa-miR-133a-3p | MIMAT0000427 | 19720047 |
| Myocytes Cardiac | hsa-miR-133a-3p | MIMAT0000427 | 23069713 |
| Myocytes Cardiac | hsa-miR-133b | MIMAT0000770 | 19720047 |
| Myocytes Cardiac | hsa-miR-150-5p | MIMAT0000451 | 23211718 |
| Myocytes Cardiac | hsa-miR-208a-3p | MIMAT0000241 | 17379774 |
| Myocytes Cardiac | hsa-miR-21-5p | MIMAT0000076 | 20219857 |
| Myocytes Cardiac | hsa-miR-223-3p | MIMAT0000280 | 20080987 |
| Myocytes Cardiac | hsa-miR-27a-3p | MIMAT0000084 | 21149577 |
| Myocytes Cardiac | hsa-miR-320a | MIMAT0000510 | 19380620 |
| Myocytes Cardiac | hsa-miR-499a-5p | MIMAT0002870 | 20081117 |
| Myocytes Cardiac | hsa-miR-499b-5p | MIMAT0019897 | 20081117 |
| Myocytes Cardiac | hsa-miR-9-5p | MIMAT0000441 | 19188439 |
| Myocytes Cardiac | mmu-miR-130a-3p | MIMAT0000141 | 19582148 |
| Myocytes Cardiac | mmu-miR-133a-3p | MIMAT0000145 | 17468766 |
| Myocytes Cardiac | mmu-miR-133a-3p | MIMAT0000145 | 20173049 |
| Myocytes Cardiac | mmu-miR-133a-3p | MIMAT0000145 | 19043405 |
| Myocytes Cardiac | mmu-miR-138-5p | MIMAT0000150 | 19004786 |
| Myocytes Cardiac | mmu-miR-15b-5p | MIMAT0000124 | 20007690 |
| Myocytes Cardiac | mmu-miR-16-5p | MIMAT0000527 | 20007690 |
| Myocytes Cardiac | mmu-miR-195a-5p | MIMAT0000225 | 20007690 |
| Myocytes Cardiac | mmu-miR-195a-5p | MIMAT0000225 | 21622680 |
| Myocytes Cardiac | mmu-miR-1a-3p | MIMAT0000123 | 19188439 |
| Myocytes Cardiac | mmu-miR-1a-3p | MIMAT0000123 | 15951802 |
| Myocytes Cardiac | mmu-miR-1a-3p | MIMAT0000123 | 23436819 |
| Myocytes Cardiac | mmu-miR-206-3p | MIMAT0000239 | 19043405 |
| Myocytes Cardiac | mmu-miR-208a-3p | MIMAT0000520 | 17379774 |
| Myocytes Cardiac | mmu-miR-21a-5p | MIMAT0000530 | 20404348 |
| Myocytes Cardiac | mmu-miR-21a-5p | MIMAT0000530 | 19043405 |
| Myocytes Cardiac | mmu-miR-320-3p | MIMAT0000666 | 19380620 |
| Myocytes Cardiac | mmu-miR-322-5p | MIMAT0000548 | 20007690 |
| Myocytes Cardiac | mmu-miR-494-3p | MIMAT0003182 | 20837890 |
| Myocytes Cardiac | rno-miR-1-3p | MIMAT0003125 | 23436819 |
| Myocytes Cardiac | rno-miR-1-3p | MIMAT0003125 | 19188439 |
| Myocytes Cardiac | rno-miR-1-3p | MIMAT0003125 | 19506341 |
| Myocytes Cardiac | rno-miR-1-3p | MIMAT0003125 | 18801338 |
| Myocytes Cardiac | rno-miR-133a-3p | MIMAT0000839 | 19720047 |
| Myocytes Cardiac | rno-miR-133b-3p | MIMAT0003126 | 19720047 |
| Myocytes Cardiac | rno-miR-15b-5p | MIMAT0000784 | 20007690 |
| Myocytes Cardiac | rno-miR-16-5p | MIMAT0000785 | 20007690 |
| Myocytes Cardiac | rno-miR-195-5p | MIMAT0000870 | 20007690 |
| Myocytes Cardiac | rno-miR-21-5p | MIMAT0000790 | 19706597 |
| Myocytes Cardiac | rno-miR-21-5p | MIMAT0000790 | 19336275 |
| Myocytes Cardiac | rno-miR-214-3p | MIMAT0000885 | 20007690 |
| Myocytes Cardiac | rno-miR-27a-3p | MIMAT0000799 | 21149577 |
| Myocytes Cardiac | rno-miR-322-5p | MIMAT0001619 | 20007690 |
| Myocytes Cardiac | rno-miR-499-5p | MIMAT0003381 | 21186368 |
| Myocytes Smooth Muscle | hsa-miR-1 | MIMAT0000416 | 21051663 |
| Myocytes Smooth Muscle | hsa-miR-1 | MIMAT0000416 | 20458751 |
| Myocytes Smooth Muscle | hsa-miR-155-5p | MIMAT0000646 | 21310411 |
| Myocytes Smooth Muscle | hsa-miR-155-5p | MIMAT0000646 | 17588946 |
| Myocytes Smooth Muscle | hsa-miR-195-5p | MIMAT0000461 | 22802111 |
| Myocytes Smooth Muscle | hsa-miR-204-5p | MIMAT0000265 | 22871591 |
| Myocytes Smooth Muscle | hsa-miR-21-5p | MIMAT0000076 | 22034194 |
| Myocytes Smooth Muscle | hsa-miR-21-5p | MIMAT0000076 | 17478730 |
| Myocytes Smooth Muscle | hsa-miR-21-5p | MIMAT0000076 | 20693317 |
| Myocytes Smooth Muscle | hsa-miR-21-5p | MIMAT0000076 | 19906824 |
| Myocytes Smooth Muscle | hsa-miR-22-3p | MIMAT0000077 | 22538858 |
| Myocytes Smooth Muscle | hsa-miR-221-3p | MIMAT0000278 | 19088079 |
| Myocytes Smooth Muscle | hsa-miR-221-3p | MIMAT0000278 | 19150885 |
| Myocytes Smooth Muscle | hsa-miR-222-3p | MIMAT0000279 | 19150885 |
| Myocytes Smooth Muscle | hsa-miR-25-3p | MIMAT0000081 | 19541842 |
| Myocytes Smooth Muscle | hsa-miR-26a-5p | MIMAT0000082 | 20857419 |
| Myocytes Smooth Muscle | hsa-miR-26a-5p | MIMAT0000082 | 20525681 |
| Myocytes Smooth Muscle | hsa-miR-31-5p | MIMAT0000089 | 23518389 |
| Myocytes Smooth Muscle | hsa-miR-638 | MIMAT0003308 | 23554459 |
| Myocytes Smooth Muscle | mmu-miR-100-3p | MIMAT0017051 | 21339483 |
| Myocytes Smooth Muscle | mmu-miR-100-5p | MIMAT0000655 | 21339483 |
| Myocytes Smooth Muscle | mmu-miR-10a-3p | MIMAT0004659 | 20118242 |
| Myocytes Smooth Muscle | mmu-miR-10a-5p | MIMAT0000648 | 20118242 |
| Myocytes Smooth Muscle | mmu-miR-125b-5p | MIMAT0000136 | 20699419 |
| Myocytes Smooth Muscle | mmu-miR-130a-3p | MIMAT0000141 | 21753805 |
| Myocytes Smooth Muscle | mmu-miR-143-3p | MIMAT0000247 | 20351064 |
| Myocytes Smooth Muscle | mmu-miR-143-3p | MIMAT0000247 | 19578358 |
| Myocytes Smooth Muscle | mmu-miR-143-3p | MIMAT0000247 | 20489207 |
| Myocytes Smooth Muscle | mmu-miR-145a-5p | MIMAT0000157 | 20351064 |
| Myocytes Smooth Muscle | mmu-miR-145a-5p | MIMAT0000157 | 19578358 |
| Myocytes Smooth Muscle | mmu-miR-1a-3p | MIMAT0000123 | 20799856 |
| Myocytes Smooth Muscle | rno-miR-145-5p | MIMAT0000851 | 19542014 |
| Myocytes Smooth Muscle | rno-miR-208a-3p | MIMAT0000880 | 21720271 |
| Myocytes Smooth Muscle | rno-miR-21-5p | MIMAT0000790 | 19158092 |
| Myocytes Smooth Muscle | rno-miR-21-5p | MIMAT0000790 | 17478730 |
| Myocytes Smooth Muscle | rno-miR-221-3p | MIMAT0000890 | 19150885 |
| Myocytes Smooth Muscle | rno-miR-222-3p | MIMAT0000891 | 19150885 |
| Myocytes Smooth Muscle | rno-miR-31a-5p | MIMAT0000810 | 19542014 |
| Myocytes Smooth Muscle | rno-miR-31a-5p | MIMAT0000810 | 22020941 |
| Myofibroblasts | hsa-miR-146a-5p | MIMAT0000449 | 21968601 |
| Myofibroblasts | mmu-miR-132-3p | MIMAT0000144 | 19843474 |
| Myofibroblasts | rno-miR-132-3p | MIMAT0000838 | 19843474 |
| Myofibroblasts | rno-miR-21-5p | MIMAT0000790 | 22565856 |
| Myofibroblasts | rno-miR-31a-5p | MIMAT0000810 | 23270756 |
| Myometrium | hsa-let-7c-5p | MIMAT0000064 | 17243163 |
| Nasopharynx | hsa-miR-200a-3p | MIMAT0000682 | 19931509 |
| Neck | hsa-miR-101-3p | MIMAT0000099 | 19043531 |
| Neck | hsa-miR-125a-5p | MIMAT0000443 | 19179615 |
| Neck | hsa-miR-135b-5p | MIMAT0000758 | 23340180 |
| Neck | hsa-miR-138-5p | MIMAT0000430 | 21770894 |
| Neck | hsa-miR-15a-5p | MIMAT0000068 | 19117988 |
| Neck | hsa-miR-181a-5p | MIMAT0000256 | 21274007 |
| Neck | hsa-miR-188-5p | MIMAT0000457 | 19223510 |
| Neck | hsa-miR-200c-3p | MIMAT0000617 | 21294122 |
| Neck | hsa-miR-200c-3p | MIMAT0000617 | 19223510 |
| Neck | hsa-miR-200c-3p | MIMAT0000617 | 21207483 |
| Neck | hsa-miR-203a | MIMAT0000264 | 18483491 |
| Neck | hsa-miR-204-5p | MIMAT0000265 | 20369013 |
| Neck | hsa-miR-21-5p | MIMAT0000076 | 18372920 |
| Neck | hsa-miR-30c-5p | MIMAT0000244 | 19223510 |
| Neck | hsa-miR-30e-5p | MIMAT0000692 | 19223510 |
| Neck | hsa-miR-31-3p | MIMAT0004504 | 20145132 |
| Neck | hsa-miR-31-5p | MIMAT0000089 | 20145132 |
| Neck | hsa-miR-34a-5p | MIMAT0000255 | 21294122 |
| Neck | hsa-miR-34a-5p | MIMAT0000255 | 21240262 |
| Neck | hsa-miR-374a-5p | MIMAT0000727 | 21274007 |
| Neck | hsa-miR-489-3p | MIMAT0002805 | 20700123 |
| Neck | hsa-miR-519a-3p | MIMAT0002869 | 21274007 |
| Neck | hsa-miR-630 | MIMAT0003299 | 21274007 |
| Neck | hsa-miR-98-5p | MIMAT0000096 | 17222355 |
| Neck | mmu-miR-204-5p | MIMAT0000237 | 20369013 |
| Neck | mmu-miR-21a-5p | MIMAT0000530 | 18372920 |
| Neoplastic Stem Cells | hsa-let-7a-5p | MIMAT0000062 | 19878981 |
| Neoplastic Stem Cells | hsa-miR-124-3p | MIMAT0000422 | 18577219 |
| Neoplastic Stem Cells | hsa-miR-128-3p | MIMAT0000424 | 20574517 |
| Neoplastic Stem Cells | hsa-miR-137 | MIMAT0000429 | 18577219 |
| Neoplastic Stem Cells | hsa-miR-145-5p | MIMAT0000437 | 21496429 |
| Neoplastic Stem Cells | hsa-miR-145-5p | MIMAT0000437 | 20382729 |
| Neoplastic Stem Cells | hsa-miR-145-5p | MIMAT0000437 | 20668064 |
| Neoplastic Stem Cells | hsa-miR-153-3p | MIMAT0000439 | 20668064 |
| Neoplastic Stem Cells | hsa-miR-16-5p | MIMAT0000069 | 20668064 |
| Neoplastic Stem Cells | hsa-miR-181a-5p | MIMAT0000256 | 19585654 |
| Neoplastic Stem Cells | hsa-miR-181b-5p | MIMAT0000257 | 19585654 |
| Neoplastic Stem Cells | hsa-miR-181c-5p | MIMAT0000258 | 19585654 |
| Neoplastic Stem Cells | hsa-miR-181d-5p | MIMAT0002821 | 19585654 |
| Neoplastic Stem Cells | hsa-miR-199b-5p | MIMAT0000263 | 23354452 |
| Neoplastic Stem Cells | hsa-miR-199b-5p | MIMAT0000263 | 19308264 |
| Neoplastic Stem Cells | hsa-miR-200a-3p | MIMAT0000682 | 21529905 |
| Neoplastic Stem Cells | hsa-miR-200c-3p | MIMAT0000617 | 19665978 |
| Neoplastic Stem Cells | hsa-miR-200c-3p | MIMAT0000617 | 21294122 |
| Neoplastic Stem Cells | hsa-miR-200c-3p | MIMAT0000617 | 21207483 |
| Neoplastic Stem Cells | hsa-miR-203a | MIMAT0000264 | 20668064 |
| Neoplastic Stem Cells | hsa-miR-21-5p | MIMAT0000076 | 22072622 |
| Neoplastic Stem Cells | hsa-miR-21-5p | MIMAT0000076 | 22528454 |
| Neoplastic Stem Cells | hsa-miR-217 | MIMAT0000274 | 20668064 |
| Neoplastic Stem Cells | hsa-miR-302a-3p | MIMAT0000684 | 21062975 |
| Neoplastic Stem Cells | hsa-miR-302b-3p | MIMAT0000715 | 21062975 |
| Neoplastic Stem Cells | hsa-miR-302c-3p | MIMAT0000717 | 21062975 |
| Neoplastic Stem Cells | hsa-miR-302d-3p | MIMAT0000718 | 21062975 |
| Neoplastic Stem Cells | hsa-miR-31-5p | MIMAT0000089 | 21048943 |
| Neoplastic Stem Cells | hsa-miR-34a-5p | MIMAT0000255 | 21240262 |
| Neoplastic Stem Cells | hsa-miR-34a-5p | MIMAT0000255 | 21294122 |
| Neoplastic Stem Cells | hsa-miR-34a-5p | MIMAT0000255 | 18803879 |
| Neoplastic Stem Cells | hsa-miR-34b-3p | MIMAT0004676 | 18803879 |
| Neoplastic Stem Cells | hsa-miR-34b-5p | MIMAT0000685 | 18803879 |
| Neoplastic Stem Cells | hsa-miR-34c-5p | MIMAT0000686 | 18803879 |
| Neoplastic Stem Cells | mmu-miR-124-3p | MIMAT0000134 | 18577219 |
| Neoplastic Stem Cells | mmu-miR-137-3p | MIMAT0000149 | 18577219 |
| Neoplastic Stem Cells | mmu-miR-137-5p | MIMAT0016986 | 18577219 |
| Nerve Fibers | hsa-miR-7-5p | MIMAT0000252 | 21156648 |
| Nerve Tissue | hsa-miR-7-5p | MIMAT0000252 | 21156648 |
| Nervous System | bta-miR-132 | MIMAT0003812 | 17553428 |
| Nervous System | bta-miR-219 | MIMAT0030444 | 17553428 |
| Nervous System | cfa-miR-132 | MIMAT0006732 | 17553428 |
| Nervous System | dre-miR-219 | MIMAT0001286 | 17553428 |
| Nervous System | hsa-miR-1 | MIMAT0000416 | 21169019 |
| Nervous System | hsa-miR-124-3p | MIMAT0000422 | 18577219 |
| Nervous System | hsa-miR-124-3p | MIMAT0000422 | 23318130 |
| Nervous System | hsa-miR-125a-5p | MIMAT0000443 | 21220473 |
| Nervous System | hsa-miR-128-3p | MIMAT0000424 | 21143953 |
| Nervous System | hsa-miR-133b | MIMAT0000770 | 17761882 |
| Nervous System | hsa-miR-137 | MIMAT0000429 | 18577219 |
| Nervous System | hsa-miR-145-5p | MIMAT0000437 | 21276775 |
| Nervous System | hsa-miR-151a-3p | MIMAT0000757 | 21143953 |
| Nervous System | hsa-miR-152-3p | MIMAT0000438 | 20841484 |
| Nervous System | hsa-miR-184 | MIMAT0000454 | 20409325 |
| Nervous System | hsa-miR-185-5p | MIMAT0000455 | 21143953 |
| Nervous System | hsa-miR-18a-5p | MIMAT0000072 | 20080637 |
| Nervous System | hsa-miR-19a-3p | MIMAT0000073 | 20080637 |
| Nervous System | hsa-miR-19b-3p | MIMAT0000074 | 20435064 |
| Nervous System | hsa-miR-214-3p | MIMAT0000271 | 21276775 |
| Nervous System | hsa-miR-29a-3p | MIMAT0000086 | 19584290 |
| Nervous System | hsa-miR-29a-3p | MIMAT0000086 | 21169019 |
| Nervous System | hsa-miR-302b-5p | MIMAT0000714 | 20435064 |
| Nervous System | hsa-miR-323a-3p | MIMAT0000755 | 20435064 |
| Nervous System | hsa-miR-326 | MIMAT0000756 | 19955368 |
| Nervous System | hsa-miR-34a-5p | MIMAT0000255 | 21266077 |
| Nervous System | hsa-miR-509-3p | MIMAT0002881 | 21143953 |
| Nervous System | mml-miR-219 | MIMAT0002575 | 17553428 |
| Nervous System | mmu-miR-124-3p | MIMAT0000134 | 18577219 |
| Nervous System | mmu-miR-124-3p | MIMAT0000134 | 17679093 |
| Nervous System | mmu-miR-124-3p | MIMAT0000134 | 21131957 |
| Nervous System | mmu-miR-124-3p | MIMAT0000134 | 18619591 |
| Nervous System | mmu-miR-132-3p | MIMAT0000144 | 17553428 |
| Nervous System | mmu-miR-134-5p | MIMAT0000146 | 20622856 |
| Nervous System | mmu-miR-137-3p | MIMAT0000149 | 18577219 |
| Nervous System | mmu-miR-137-5p | MIMAT0016986 | 18577219 |
| Nervous System | mmu-miR-155-5p | MIMAT0000165 | 21247879 |
| Nervous System | mmu-miR-219a-5p | MIMAT0000664 | 17553428 |
| Nervous System | mmu-miR-23a-3p | MIMAT0000532 | 19259393 |
| Nervous System | mmu-miR-23b-3p | MIMAT0000125 | 19259393 |
| Nervous System | mmu-miR-298-5p | MIMAT0000376 | 21247879 |
| Nervous System | mmu-miR-29b-3p | MIMAT0000127 | 21245165 |
| Nervous System | mmu-miR-351-5p | MIMAT0000609 | 21247879 |
| Nervous System | mmu-miR-9-5p | MIMAT0000142 | 21238922 |
| Nervous System | ppy-miR-132 | MIMAT0015755 | 17553428 |
| Nervous System | ppy-miR-219 | MIMAT0002577 | 17553428 |
| Nervous System | rno-miR-134-5p | MIMAT0000840 | 16421561 |
| Nervous System | rno-miR-140-3p | MIMAT0000574 | 18845019 |
| Nervous System | rno-miR-34a-5p | MIMAT0000815 | 18704095 |
| Nervous System | ssc-miR-132 | MIMAT0025361 | 17553428 |
| Nervous System | ssc-miR-219 | MIMAT0020590 | 17553428 |
| Nervous System | xtr-miR-132 | MIMAT0003594 | 17553428 |
| Nervous System | xtr-miR-219 | MIMAT0003632 | 17553428 |
| Neural Crest | hsa-miR-18a-5p | MIMAT0000072 | 20080637 |
| Neural Crest | hsa-miR-19a-3p | MIMAT0000073 | 20080637 |
| Neural Crest | mmu-miR-143-3p | MIMAT0000247 | 19578358 |
| Neural Crest | mmu-miR-145a-5p | MIMAT0000157 | 19578358 |
| Neural Plate | hsa-miR-302a-3p | MIMAT0000684 | 19386261 |
| Neural Stem Cells | hsa-let-7b-5p | MIMAT0000063 | 20133835 |
| Neural Stem Cells | hsa-miR-124-3p | MIMAT0000422 | 18577219 |
| Neural Stem Cells | hsa-miR-128-3p | MIMAT0000424 | 19010882 |
| Neural Stem Cells | hsa-miR-137 | MIMAT0000429 | 18577219 |
| Neural Stem Cells | hsa-miR-9-5p | MIMAT0000441 | 19330006 |
| Neural Stem Cells | mmu-let-7b-5p | MIMAT0000522 | 20133835 |
| Neural Stem Cells | mmu-miR-124-3p | MIMAT0000134 | 18577219 |
| Neural Stem Cells | mmu-miR-137-3p | MIMAT0000149 | 20368621 |
| Neural Stem Cells | mmu-miR-137-3p | MIMAT0000149 | 18577219 |
| Neural Stem Cells | mmu-miR-137-5p | MIMAT0016986 | 18577219 |
| Neural Stem Cells | mmu-miR-146a-5p | MIMAT0000158 | 21730286 |
| Neurites | hsa-miR-141-3p | MIMAT0000432 | 20584986 |
| Neurites | hsa-miR-145-5p | MIMAT0000437 | 21276775 |
| Neurites | hsa-miR-18a-5p | MIMAT0000072 | 20080637 |
| Neurites | hsa-miR-19a-3p | MIMAT0000073 | 20080637 |
| Neurites | hsa-miR-205-5p | MIMAT0000266 | 23125283 |
| Neurites | hsa-miR-21-5p | MIMAT0000076 | 20584986 |
| Neurites | hsa-miR-214-3p | MIMAT0000271 | 21276775 |
| Neurites | hsa-miR-375 | MIMAT0000728 | 20584986 |
| Neurites | mmu-miR-141-3p | MIMAT0000153 | 20584986 |
| Neurites | mmu-miR-205-5p | MIMAT0000238 | 23125283 |
| Neurites | mmu-miR-375-3p | MIMAT0000739 | 20584986 |
| Neurites | rno-miR-141-3p | MIMAT0000846 | 20584986 |
| Neurites | rno-miR-21-5p | MIMAT0000790 | 20584986 |
| Neuroendocrine Cells | mmu-miR-17-5p | MIMAT0000649 | 17765889 |
| Neurofibrillary Tangles | mmu-miR-135a-5p | MIMAT0000147 | 20619502 |
| Neurofibrillary Tangles | mmu-miR-16-5p | MIMAT0000527 | 20619502 |
| Neurofibrillary Tangles | mmu-miR-195a-5p | MIMAT0000225 | 22721728 |
| Neurofibrillary Tangles | mmu-miR-20a-5p | MIMAT0000529 | 20619502 |
| Neuroglia | hsa-miR-125b-5p | MIMAT0000423 | 20347935 |
| Neuroglia | mmu-miR-155-5p | MIMAT0000165 | 21247879 |
| Neuroglia | mmu-miR-298-5p | MIMAT0000376 | 21247879 |
| Neuroglia | mmu-miR-351-5p | MIMAT0000609 | 21247879 |
| Neurons | hsa-let-7a-5p | MIMAT0000062 | 19110058 |
| Neurons | hsa-let-7d-5p | MIMAT0000065 | 19110058 |
| Neurons | hsa-miR-101-3p | MIMAT0000099 | 20395292 |
| Neurons | hsa-miR-101-3p | MIMAT0000099 | 21172309 |
| Neurons | hsa-miR-106a-5p | MIMAT0000103 | 19110058 |
| Neurons | hsa-miR-106b-5p | MIMAT0000680 | 19110058 |
| Neurons | hsa-miR-107 | MIMAT0000104 | 20489155 |
| Neurons | hsa-miR-10a-5p | MIMAT0000253 | 20506192 |
| Neurons | hsa-miR-124-3p | MIMAT0000422 | 23318130 |
| Neurons | hsa-miR-125a-5p | MIMAT0000443 | 16227573 |
| Neurons | hsa-miR-125b-5p | MIMAT0000423 | 20159450 |
| Neurons | hsa-miR-125b-5p | MIMAT0000423 | 16227573 |
| Neurons | hsa-miR-128-3p | MIMAT0000424 | 21143953 |
| Neurons | hsa-miR-130a-3p | MIMAT0000425 | 19110058 |
| Neurons | hsa-miR-132-3p | MIMAT0000426 | 18577589 |
| Neurons | hsa-miR-132-3p | MIMAT0000426 | 18082412 |
| Neurons | hsa-miR-133b | MIMAT0000770 | 19695767 |
| Neurons | hsa-miR-133b | MIMAT0000770 | 17761882 |
| Neurons | hsa-miR-137 | MIMAT0000429 | 22003227 |
| Neurons | hsa-miR-145-5p | MIMAT0000437 | 21276775 |
| Neurons | hsa-miR-151a-3p | MIMAT0000757 | 21143953 |
| Neurons | hsa-miR-15a-5p | MIMAT0000068 | 19110058 |
| Neurons | hsa-miR-17-5p | MIMAT0000070 | 19110058 |
| Neurons | hsa-miR-185-5p | MIMAT0000455 | 21143953 |
| Neurons | hsa-miR-205-5p | MIMAT0000266 | 23125283 |
| Neurons | hsa-miR-20a-5p | MIMAT0000075 | 19110058 |
| Neurons | hsa-miR-21-5p | MIMAT0000076 | 21170291 |
| Neurons | hsa-miR-214-3p | MIMAT0000271 | 21276775 |
| Neurons | hsa-miR-30a-5p | MIMAT0000087 | 18632683 |
| Neurons | hsa-miR-509-3p | MIMAT0002881 | 21143953 |
| Neurons | hsa-miR-7-5p | MIMAT0000252 | 19628698 |
| Neurons | hsa-miR-9-3p | MIMAT0000442 | 19118166 |
| Neurons | hsa-miR-9-5p | MIMAT0000441 | 19118166 |
| Neurons | mmu-miR-124-3p | MIMAT0000134 | 19287386 |
| Neurons | mmu-miR-124-3p | MIMAT0000134 | 17679093 |
| Neurons | mmu-miR-124-3p | MIMAT0000134 | 18619591 |
| Neurons | mmu-miR-125b-5p | MIMAT0000136 | 16227573 |
| Neurons | mmu-miR-134-5p | MIMAT0000146 | 20126250 |
| Neurons | mmu-miR-16-5p | MIMAT0000527 | 20847275 |
| Neurons | mmu-miR-205-5p | MIMAT0000238 | 23125283 |
| Neurons | mmu-miR-206-3p | MIMAT0000239 | 20007902 |
| Neurons | mmu-miR-29b-3p | MIMAT0000127 | 21245165 |
| Neurons | mmu-miR-9-5p | MIMAT0000142 | 21238922 |
| Neurons | rno-miR-1-3p | MIMAT0003125 | 16260724 |
| Neurons | rno-miR-132-3p | MIMAT0000838 | 17994015 |
| Neurons | rno-miR-132-3p | MIMAT0000838 | 19958814 |
| Neurons | rno-miR-132-3p | MIMAT0000838 | 16260724 |
| Neurons | rno-miR-133b-3p | MIMAT0003126 | 19695767 |
| Neurons | rno-miR-134-5p | MIMAT0000840 | 16421561 |
| Neurons | rno-miR-134-5p | MIMAT0000840 | 19197241 |
| Neurons | rno-miR-181a-5p | MIMAT0000858 | 22144581 |
| Neurons | rno-miR-21-5p | MIMAT0000790 | 20840605 |
| Neurons | rno-miR-338-3p | MIMAT0000581 | 19020050 |
| Neurons | rno-miR-92a-3p | MIMAT0000816 | 20050974 |
| Neutrophils | hsa-miR-146a-5p | MIMAT0000449 | 20375304 |
| Neutrophils | hsa-miR-155-5p | MIMAT0000646 | 19289835 |
| Neutrophils | hsa-miR-223-3p | MIMAT0000280 | 18278031 |
| Neutrophils | hsa-miR-9-5p | MIMAT0000441 | 19289835 |
| Neutrophils | mmu-miR-223-3p | MIMAT0000665 | 18278031 |
| NIH 3T3 Cells | mmu-miR-298-5p | MIMAT0000376 | 18986979 |
| NIH 3T3 Cells | mmu-miR-328-3p | MIMAT0000565 | 18986979 |
| NIH 3T3 Cells | rno-miR-335 | MIMAT0000575 | 20933506 |
| Nuclear Envelope | mmu-miR-23a-3p | MIMAT0000532 | 19259393 |
| Nuclear Envelope | mmu-miR-23b-3p | MIMAT0000125 | 19259393 |
| Nuclear Envelope | mmu-miR-31-5p | MIMAT0000538 | 20081371 |
| Nuclear Lamina | mmu-miR-31-5p | MIMAT0000538 | 20081371 |
| Nuclear Pore | mmu-miR-23a-3p | MIMAT0000532 | 19259393 |
| Nuclear Pore | mmu-miR-23b-3p | MIMAT0000125 | 19259393 |
| Nucleus Accumbens | rno-miR-181a-5p | MIMAT0000858 | 22144581 |
| Odontoblasts | hsa-miR-338-3p | MIMAT0000763 | 23380982 |
| Oligodendroglia | hsa-miR-122-5p | MIMAT0000421 | 23348614 |
| Oligodendroglia | hsa-miR-206 | MIMAT0000462 | 19606501 |
| Oligodendroglia | mmu-miR-206-3p | MIMAT0000239 | 19606501 |
| Oligodendroglia | mmu-miR-219a-5p | MIMAT0000664 | 20223197 |
| Oligodendroglia | mmu-miR-219a-5p | MIMAT0000664 | 20223198 |
| Oligodendroglia | mmu-miR-23a-3p | MIMAT0000532 | 19259393 |
| Oligodendroglia | mmu-miR-23b-3p | MIMAT0000125 | 19259393 |
| Oligodendroglia | rno-miR-206-3p | MIMAT0000879 | 19606501 |
| Oligodendroglia | rno-miR-9a-5p | MIMAT0000781 | 18987208 |
| Oocytes | hsa-miR-224-5p | MIMAT0000281 | 20118412 |
| Oocytes | hsa-miR-302b-3p | MIMAT0000715 | 19342891 |
| Oocytes | mmu-miR-503-5p | MIMAT0003188 | 19799966 |
| Organelles | hsa-miR-320a | MIMAT0000510 | 18523662 |
| Osteoblasts | hsa-miR-125a-5p | MIMAT0000443 | 19011087 |
| Osteoblasts | hsa-miR-125b-5p | MIMAT0000423 | 19011087 |
| Osteoblasts | hsa-miR-199a-5p | MIMAT0000231 | 19011087 |
| Osteoblasts | hsa-miR-199a-5p | MIMAT0000231 | 22441842 |
| Osteoblasts | hsa-miR-26a-5p | MIMAT0000082 | 18197755 |
| Osteoblasts | hsa-miR-26a-5p | MIMAT0000082 | 19011087 |
| Osteoblasts | hsa-miR-29b-3p | MIMAT0000100 | 23478036 |
| Osteoblasts | hsa-miR-30c-5p | MIMAT0000244 | 23469762 |
| Osteoblasts | hsa-miR-346 | MIMAT0000773 | 19011087 |
| Osteoblasts | hsa-miR-34b-3p | MIMAT0004676 | 22498974 |
| Osteoblasts | hsa-miR-34c-5p | MIMAT0000686 | 22498974 |
| Osteoblasts | hsa-miR-433-3p | MIMAT0001627 | 23353875 |
| Osteoblasts | hsa-miR-637 | MIMAT0003307 | 21880893 |
| Osteoblasts | mmu-miR-206-3p | MIMAT0000239 | 19933329 |
| Osteoblasts | mmu-miR-2861 | MIMAT0013803 | 19920351 |
| Osteoblasts | mmu-miR-370-3p | MIMAT0001095 | 22587915 |
| Osteoblasts | mmu-miR-3960 | MIMAT0019336 | 21324897 |
| Osteoclasts | hsa-miR-148b-3p | MIMAT0000759 | 23238785 |
| Osteoclasts | hsa-miR-34b-3p | MIMAT0004676 | 22498974 |
| Osteoclasts | hsa-miR-34c-5p | MIMAT0000686 | 22498974 |
| Ovary | hsa-miR-101-3p | MIMAT0000099 | 17875710 |
| Ovary | hsa-miR-125a-5p | MIMAT0000443 | 21220473 |
| Ovary | hsa-miR-140-5p | MIMAT0000431 | 17875710 |
| Ovary | hsa-miR-141-3p | MIMAT0000432 | 19854497 |
| Ovary | hsa-miR-141-3p | MIMAT0000432 | 17875710 |
| Ovary | hsa-miR-143-3p | MIMAT0000435 | 17875710 |
| Ovary | hsa-miR-199a-5p | MIMAT0000231 | 17875710 |
| Ovary | hsa-miR-200a-3p | MIMAT0000682 | 17875710 |
| Ovary | hsa-miR-200a-3p | MIMAT0000682 | 19854497 |
| Ovary | hsa-miR-200b-3p | MIMAT0000318 | 17875710 |
| Ovary | hsa-miR-200b-3p | MIMAT0000318 | 19854497 |
| Ovary | hsa-miR-200c-3p | MIMAT0000617 | 17875710 |
| Ovary | hsa-miR-200c-3p | MIMAT0000617 | 19854497 |
| Ovary | hsa-miR-212-3p | MIMAT0000269 | 17875710 |
| Ovary | hsa-miR-29c-3p | MIMAT0000681 | 21436257 |
| Ovary | hsa-miR-429 | MIMAT0001536 | 19854497 |
| Ovary | hsa-miR-9-5p | MIMAT0000441 | 19702828 |
| Ovary | mmu-miR-466h-5p | MIMAT0004884 | 21337326 |
| Ovary | mmu-miR-503-5p | MIMAT0003188 | 19799966 |
| Palate | hsa-miR-140-5p | MIMAT0000431 | 22012839 |
| Pancreas | hsa-miR-143-3p | MIMAT0000435 | 16966691 |
| Pancreas | hsa-miR-182-5p | MIMAT0000259 | 19569050 |
| Pancreas | hsa-miR-194-5p | MIMAT0000460 | 19569050 |
| Pancreas | hsa-miR-197-3p | MIMAT0000227 | 23139153 |
| Pancreas | hsa-miR-200b-3p | MIMAT0000318 | 19569050 |
| Pancreas | hsa-miR-200c-3p | MIMAT0000617 | 19569050 |
| Pancreas | hsa-miR-21-5p | MIMAT0000076 | 18372920 |
| Pancreas | hsa-miR-21-5p | MIMAT0000076 | 16966691 |
| Pancreas | hsa-miR-26b-5p | MIMAT0000083 | 19569050 |
| Pancreas | hsa-miR-298 | MIMAT0004901 | 18642050 |
| Pancreas | hsa-miR-30a-5p | MIMAT0000087 | 23338554 |
| Pancreas | hsa-miR-34a-5p | MIMAT0000255 | 21240262 |
| Pancreas | hsa-miR-374a-5p | MIMAT0000727 | 19569050 |
| Pancreas | hsa-miR-429 | MIMAT0001536 | 19569050 |
| Pancreas | hsa-miR-520h | MIMAT0002867 | 20628378 |
| Pancreas | mmu-miR-124-3p | MIMAT0000134 | 17462994 |
| Pancreas | mmu-miR-19b-3p | MIMAT0000513 | 21781967 |
| Pancreas | mmu-miR-21a-5p | MIMAT0000530 | 18372920 |
| Pancreatic Ducts | hsa-miR-146a-5p | MIMAT0000449 | 20124483 |
| PC12 Cells | hsa-miR-15a-5p | MIMAT0000068 | 20621999 |
| PC12 Cells | hsa-miR-16-5p | MIMAT0000069 | 20621999 |
| PC12 Cells | hsa-miR-221-3p | MIMAT0000278 | 19438724 |
| PC12 Cells | hsa-miR-222-3p | MIMAT0000279 | 19438724 |
| PC12 Cells | rno-miR-140-3p | MIMAT0000574 | 18845019 |
| PC12 Cells | rno-miR-221-3p | MIMAT0000890 | 19438724 |
| PC12 Cells | rno-miR-222-3p | MIMAT0000891 | 19438724 |
| Pericardium | rno-miR-31a-5p | MIMAT0000810 | 23270756 |
| Philadelphia Chromosome | hsa-miR-203a | MIMAT0000264 | 18538733 |
| Photoreceptor Cells | hsa-miR-182-5p | MIMAT0000259 | 17597072 |
| Vertebrate | | | |
| Photoreceptor Cells | hsa-miR-96-5p | MIMAT0000095 | 17597072 |
| Vertebrate | | | |
| Placenta | hsa-miR-106a-5p | MIMAT0000103 | 23438603 |
| Placenta | hsa-miR-125b-5p | MIMAT0000423 | 21703189 |
| Placenta | hsa-miR-155-5p | MIMAT0000646 | 20452491 |
| Placenta | hsa-miR-195-5p | MIMAT0000461 | 20952681 |
| Placenta | hsa-miR-19b-3p | MIMAT0000074 | 23438603 |
| Plasma | hsa-let-7a-5p | MIMAT0000062 | 19939273 |
| Plasma | hsa-let-7c-3p | MIMAT0026472 | 19939273 |
| Plasma | hsa-let-7c-5p | MIMAT0000064 | 19939273 |
| Plasma | hsa-let-7d-3p | MIMAT0004484 | 19939273 |
| Plasma | hsa-let-7d-5p | MIMAT0000065 | 19939273 |
| Plasma | hsa-let-7e-3p | MIMAT0004485 | 19939273 |
| Plasma | hsa-let-7e-5p | MIMAT0000066 | 19939273 |
| Plasma | hsa-let-7g-3p | MIMAT0004584 | 19939273 |
| Plasma | hsa-let-7g-5p | MIMAT0000414 | 19939273 |
| Plasma | hsa-let-7i-3p | MIMAT0004585 | 19939273 |
| Plasma | hsa-let-7i-5p | MIMAT0000415 | 19939273 |
| Plasma | hsa-miR-1 | MIMAT0000416 | 23141496 |
| Plasma | hsa-miR-106a-5p | MIMAT0000103 | 20385818 |
| Plasma | hsa-miR-106b-5p | MIMAT0000680 | 20385818 |
| Plasma | hsa-miR-106b-5p | MIMAT0000680 | 18728182 |
| Plasma | hsa-miR-122-5p | MIMAT0000421 | 16459310 |
| Plasma | hsa-miR-125b-5p | MIMAT0000423 | 20497960 |
| Plasma | hsa-miR-145-5p | MIMAT0000437 | 23201159 |
| Plasma | hsa-miR-181a-5p | MIMAT0000256 | 18728182 |
| Plasma | hsa-miR-181b-5p | MIMAT0000257 | 18728182 |
| Plasma | hsa-miR-19a-3p | MIMAT0000073 | 18728182 |
| Plasma | hsa-miR-19b-3p | MIMAT0000074 | 18728182 |
| Plasma | hsa-miR-221-3p | MIMAT0000278 | 21487968 |
| Plasma | hsa-miR-25-3p | MIMAT0000081 | 18728182 |
| Plasma | hsa-miR-32-5p | MIMAT0000090 | 18728182 |
| Plasma | hsa-miR-33a-5p | MIMAT0000091 | 20466882 |
| Plasma | hsa-miR-33a-5p | MIMAT0000091 | 20466885 |
| Plasma | hsa-miR-33b-5p | MIMAT0003301 | 20466882 |
| Plasma | hsa-miR-503-5p | MIMAT0002874 | 21220732 |
| Plasma | hsa-miR-92a-3p | MIMAT0000092 | 18728182 |
| Plasma | hsa-miR-93-5p | MIMAT0000093 | 18728182 |
| Plasma | mmu-miR-122-5p | MIMAT0000246 | 21364282 |
| Plasma | mmu-miR-122-5p | MIMAT0000246 | 16459310 |
| Plasma | mmu-miR-122-5p | MIMAT0000246 | 18158304 |
| Plasma | mmu-miR-122-5p | MIMAT0000246 | 16258535 |
| Plasma | mmu-miR-155-5p | MIMAT0000165 | 18055230 |
| Plasma | mmu-miR-33-5p | MIMAT0000667 | 20466885 |
| Plasma Cells | hsa-miR-106b-5p | MIMAT0000680 | 18728182 |
| Plasma Cells | hsa-miR-125b-5p | MIMAT0000423 | 20497960 |
| Plasma Cells | hsa-miR-181a-5p | MIMAT0000256 | 18728182 |
| Plasma Cells | hsa-miR-181b-5p | MIMAT0000257 | 18728182 |
| Plasma Cells | hsa-miR-19a-3p | MIMAT0000073 | 18728182 |
| Plasma Cells | hsa-miR-19b-3p | MIMAT0000074 | 18728182 |
| Plasma Cells | hsa-miR-25-3p | MIMAT0000081 | 18728182 |
| Plasma Cells | hsa-miR-32-5p | MIMAT0000090 | 18728182 |
| Plasma Cells | hsa-miR-92a-3p | MIMAT0000092 | 18728182 |
| Plasma Cells | hsa-miR-93-5p | MIMAT0000093 | 18728182 |
| Pluripotent Stem Cells | hsa-miR-124-3p | MIMAT0000422 | 20362537 |
| Pluripotent Stem Cells | hsa-miR-302a-3p | MIMAT0000684 | 21062975 |
| Pluripotent Stem Cells | hsa-miR-302a-3p | MIMAT0000684 | 23185040 |
| Pluripotent Stem Cells | hsa-miR-302b-3p | MIMAT0000715 | 21062975 |
| Pluripotent Stem Cells | hsa-miR-302b-3p | MIMAT0000715 | 23185040 |
| Pluripotent Stem Cells | hsa-miR-302c-3p | MIMAT0000717 | 21062975 |
| Pluripotent Stem Cells | hsa-miR-302c-3p | MIMAT0000717 | 23185040 |
| Pluripotent Stem Cells | hsa-miR-302d-3p | MIMAT0000718 | 21062975 |
| Pluripotent Stem Cells | hsa-miR-302d-3p | MIMAT0000718 | 23185040 |
| Pluripotent Stem Cells | hsa-miR-9-5p | MIMAT0000441 | 20362537 |
| Pluripotent Stem Cells | mmu-let-7c-5p | MIMAT0000523 | 20054295 |
| Pluripotent Stem Cells | mmu-miR-106b-5p | MIMAT0000386 | 21285944 |
| Pluripotent Stem Cells | mmu-miR-9-5p | MIMAT0000142 | 20362537 |
| Pluripotent Stem Cells | mmu-miR-93-5p | MIMAT0000540 | 21285944 |
| Podocytes | mmu-miR-29c-3p | MIMAT0000536 | 21310958 |
| Podocytes | rno-miR-192-5p | MIMAT0000867 | 20393144 |
| Podocytes | rno-miR-215 | MIMAT0003118 | 20393144 |
| Polyribosomes | hsa-miR-122-5p | MIMAT0000421 | 16777601 |
| Polyribosomes | hsa-miR-30a-3p | MIMAT0000088 | 16239240 |
| Polyribosomes | hsa-miR-519a-3p | MIMAT0002869 | 19088191 |
| Polyribosomes | hsa-miR-519b-3p | MIMAT0002837 | 19088191 |
| Polyribosomes | hsa-miR-519c-3p | MIMAT0002832 | 19088191 |
| Polyribosomes | mmu-miR-23b-3p | MIMAT0000125 | 18716031 |
| Portal Vein | hsa-miR-328-3p | MIMAT0000752 | 18560585 |
| Portal Vein | hsa-miR-328-5p | MIMAT0026486 | 18560585 |
| Precursor Cells T-Lymphoid | hsa-miR-222-3p | MIMAT0000279 | 23522449 |
| Prefrontal Cortex | hsa-miR-219a-5p | MIMAT0000276 | 19196972 |
| Prefrontal Cortex | hsa-miR-30a-5p | MIMAT0000087 | 18632683 |
| Prefrontal Cortex | mmu-miR-219a-5p | MIMAT0000664 | 19196972 |
| Prefrontal Cortex | rno-let-7d-5p | MIMAT0000562 | 20557304 |
| Prosencephalon | hsa-miR-132-3p | MIMAT0000426 | 18082412 |
| Prosencephalon | mmu-miR-9-5p | MIMAT0000142 | 21238922 |
| Prostate | hsa-let-7a-5p | MIMAT0000062 | 20418948 |
| Prostate | hsa-miR-101-3p | MIMAT0000099 | 20478051 |
| Prostate | hsa-miR-101-3p | MIMAT0000099 | 19008416 |
| Prostate | hsa-miR-106a-5p | MIMAT0000103 | 16461460 |
| Prostate | hsa-miR-106b-5p | MIMAT0000680 | 18676839 |
| Prostate | hsa-miR-107 | MIMAT0000104 | 20884628 |
| Prostate | hsa-miR-122-5p | MIMAT0000421 | 20884628 |
| Prostate | hsa-miR-125b-5p | MIMAT0000423 | 17891175 |
| Prostate | hsa-miR-125b-5p | MIMAT0000423 | 18056640 |
| Prostate | hsa-miR-126-3p | MIMAT0000445 | 18193184 |
| Prostate | hsa-miR-126-5p | MIMAT0000444 | 18193184 |
| Prostate | hsa-miR-1296-5p | MIMAT0005794 | 20332239 |
| Prostate | hsa-miR-138-5p | MIMAT0000430 | 18193184 |
| Prostate | hsa-miR-141-3p | MIMAT0000432 | 21224847 |
| Prostate | hsa-miR-143-3p | MIMAT0000435 | 20353999 |
| Prostate | hsa-miR-145-5p | MIMAT0000437 | 23355420 |
| Prostate | hsa-miR-145-5p | MIMAT0000437 | 23480797 |
| Prostate | hsa-miR-145-5p | MIMAT0000437 | 21360565 |
| Prostate | hsa-miR-145-5p | MIMAT0000437 | 20353999 |
| Prostate | hsa-miR-145-5p | MIMAT0000437 | 19996289 |
| Prostate | hsa-miR-146a-5p | MIMAT0000449 | 18174313 |
| Prostate | hsa-miR-146a-5p | MIMAT0000449 | 22161865 |
| Prostate | hsa-miR-16-5p | MIMAT0000069 | 19738602 |
| Prostate | hsa-miR-17-3p | MIMAT0000071 | 19771525 |
| Prostate | hsa-miR-17-3p | MIMAT0000071 | 21203553 |
| Prostate | hsa-miR-17-5p | MIMAT0000070 | 19771525 |
| Prostate | hsa-miR-182-5p | MIMAT0000259 | 19574223 |
| Prostate | hsa-miR-185-5p | MIMAT0000455 | 23417242 |
| Prostate | hsa-miR-199b-5p | MIMAT0000263 | 23354452 |
| Prostate | hsa-miR-200c-3p | MIMAT0000617 | 21224847 |
| Prostate | hsa-miR-205-5p | MIMAT0000266 | 20737563 |
| Prostate | hsa-miR-20a-5p | MIMAT0000075 | 16461460 |
| Prostate | hsa-miR-21-5p | MIMAT0000076 | 21317927 |
| Prostate | hsa-miR-21-5p | MIMAT0000076 | 19302977 |
| Prostate | hsa-miR-21-5p | MIMAT0000076 | 20813833 |
| Prostate | hsa-miR-21-5p | MIMAT0000076 | 21826097 |
| Prostate | hsa-miR-21-5p | MIMAT0000076 | 18372920 |
| Prostate | hsa-miR-21-5p | MIMAT0000076 | 19578724 |
| Prostate | hsa-miR-211-5p | MIMAT0000268 | 21072171 |
| Prostate | hsa-miR-217 | MIMAT0000274 | 19008416 |
| Prostate | hsa-miR-221-3p | MIMAT0000278 | 18834855 |
| Prostate | hsa-miR-221-3p | MIMAT0000278 | 21487968 |
| Prostate | hsa-miR-224-5p | MIMAT0000281 | 20180642 |
| Prostate | hsa-miR-26a-5p | MIMAT0000082 | 16461460 |
| Prostate | hsa-miR-26a-5p | MIMAT0000082 | 20478051 |
| Prostate | hsa-miR-27a-3p | MIMAT0000084 | 19574223 |
| Prostate | hsa-miR-29b-3p | MIMAT0000100 | 20657750 |
| Prostate | hsa-miR-32-5p | MIMAT0000090 | 18676839 |
| Prostate | hsa-miR-330-3p | MIMAT0000751 | 19597470 |
| Prostate | hsa-miR-331-3p | MIMAT0000760 | 19996289 |
| Prostate | hsa-miR-34a-5p | MIMAT0000255 | 20433755 |
| Prostate | hsa-miR-34a-5p | MIMAT0000255 | 21240262 |
| Prostate | hsa-miR-34a-5p | MIMAT0000255 | 18834855 |
| Prostate | hsa-miR-377-3p | MIMAT0000730 | 21203553 |
| Prostate | hsa-miR-449a | MIMAT0001541 | 19252524 |
| Prostate | hsa-miR-449a | MIMAT0001541 | 20948989 |
| Prostate | hsa-miR-521 | MIMAT0002854 | 18668526 |
| Prostate | hsa-miR-616-3p | MIMAT0004805 | 21224345 |
| Prostate | hsa-miR-616-5p | MIMAT0003284 | 21224345 |
| Prostate | hsa-miR-96-5p | MIMAT0000095 | 19574223 |
| Prostate | mmu-miR-21a-5p | MIMAT0000530 | 18372920 |
| Pseudopodia | hsa-miR-10b-5p | MIMAT0000254 | 22573479 |
| Pseudopodia | hsa-miR-124-3p | MIMAT0000422 | 21672940 |
| Pulmonary Artery | hsa-miR-21-5p | MIMAT0000076 | 20693317 |
| Raphe Nuclei | mmu-miR-16-5p | MIMAT0000527 | 20847275 |
| Reed-Sternberg Cells | hsa-let-7a-5p | MIMAT0000062 | 18583325 |
| Reed-Sternberg Cells | hsa-miR-9-5p | MIMAT0000441 | 18583325 |
| Reticulocytes | hsa-miR-320a | MIMAT0000510 | 18523662 |
| Retina | hsa-miR-124-3p | MIMAT0000422 | 17724173 |
| Retina | hsa-miR-182-5p | MIMAT0000259 | 17597072 |
| Retina | hsa-miR-204-5p | MIMAT0000265 | 20056717 |
| Retina | hsa-miR-204-5p | MIMAT0000265 | 20713703 |
| Retina | hsa-miR-21-5p | MIMAT0000076 | 20056717 |
| Retina | hsa-miR-29a-3p | MIMAT0000086 | 17724173 |
| Retina | hsa-miR-29b-3p | MIMAT0000100 | 17724173 |
| Retina | hsa-miR-96-5p | MIMAT0000095 | 17597072 |
| Retina | mmu-miR-150-5p | MIMAT0000160 | 18500251 |
| Retina | mmu-miR-184-3p | MIMAT0000213 | 18500251 |
| Retina | mmu-miR-31-5p | MIMAT0000538 | 18500251 |
| Retinal Pigment Epithelium | hsa-miR-204-5p | MIMAT0000265 | 20056717 |
| Retinal Pigment Epithelium | hsa-miR-21-5p | MIMAT0000076 | 20056717 |
| Rhombencephalon | mmu-miR-9-5p | MIMAT0000142 | 21238922 |
| Saphenous Vein | hsa-miR-503-5p | MIMAT0002874 | 21220732 |
| Sarcolemma | hsa-miR-206 | MIMAT0000462 | 17030984 |
| Sarcolemma | mmu-miR-206-3p | MIMAT0000239 | 17030984 |
| Sarcomeres | hsa-miR-21-5p | MIMAT0000076 | 18508928 |
| Sarcomeres | mmu-miR-21a-5p | MIMAT0000530 | 18508928 |
| Sarcoplasmic Reticulum | hsa-miR-1 | MIMAT0000416 | 19131648 |
| Satellite Cells Skeletal | mmu-miR-1a-3p | MIMAT0000123 | 20819939 |
| Muscle | | | |
| Satellite Cells Skeletal | mmu-miR-206-3p | MIMAT0000239 | 20819939 |
| Muscle | | | |
| Schwann Cells | hsa-miR-10b-5p | MIMAT0000254 | 20550523 |
| Schwann Cells | hsa-miR-7-5p | MIMAT0000252 | 21156648 |
| Schwann Cells | rno-miR-29a-3p | MIMAT0000802 | 19170179 |
| Schwann Cells | rno-miR-9a-5p | MIMAT0000781 | 18987208 |
| Sciatic Nerve | hsa-miR-145-5p | MIMAT0000437 | 21276775 |
| Sciatic Nerve | hsa-miR-214-3p | MIMAT0000271 | 21276775 |
| Secretory Vesicles | hsa-miR-9-5p | MIMAT0000441 | 16831872 |
| Secretory Vesicles | rno-miR-9a-5p | MIMAT0000781 | 16831872 |
| Serum | hsa-miR-1 | MIMAT0000416 | 20458751 |
| Serum | hsa-miR-1 | MIMAT0000416 | 19775284 |
| Serum | hsa-miR-1 | MIMAT0000416 | 15951802 |
| Serum | hsa-miR-101-3p | MIMAT0000099 | 19155302 |
| Serum | hsa-miR-122-5p | MIMAT0000421 | 20351063 |
| Serum | hsa-miR-122-5p | MIMAT0000421 | 19726678 |
| Serum | hsa-miR-130a-3p | MIMAT0000425 | 17957028 |
| Serum | hsa-miR-132-3p | MIMAT0000426 | 19819989 |
| Serum | hsa-miR-133a-3p | MIMAT0000427 | 17344217 |
| Serum | hsa-miR-133b | MIMAT0000770 | 17344217 |
| Serum | hsa-miR-181a-5p | MIMAT0000256 | 22476949 |
| Serum | hsa-miR-200b-3p | MIMAT0000318 | 22144583 |
| Serum | hsa-miR-206 | MIMAT0000462 | 19620785 |
| Serum | hsa-miR-21-5p | MIMAT0000076 | 21347332 |
| Serum | hsa-miR-21-5p | MIMAT0000076 | 22956424 |
| Serum | hsa-miR-21-5p | MIMAT0000076 | 19826040 |
| Serum | hsa-miR-221-3p | MIMAT0000278 | 20516212 |
| Serum | hsa-miR-221-3p | MIMAT0000278 | 18413744 |
| Serum | hsa-miR-222-3p | MIMAT0000279 | 18413744 |
| Serum | hsa-miR-26a-5p | MIMAT0000082 | 20857419 |
| Serum | hsa-miR-29a-3p | MIMAT0000086 | 20041405 |
| Serum | hsa-miR-29b-3p | MIMAT0000100 | 20041405 |
| Serum | hsa-miR-29c-3p | MIMAT0000681 | 20041405 |
| Serum | hsa-miR-31-5p | MIMAT0000089 | 23518389 |
| Serum | hsa-miR-422a | MIMAT0001339 | 20351063 |
| Serum | mmu-let-7c-5p | MIMAT0000523 | 17438130 |
| Serum | mmu-miR-133a-3p | MIMAT0000145 | 16380711 |
| Serum | mmu-miR-133a-3p | MIMAT0000145 | 16923828 |
| Serum | mmu-miR-143-3p | MIMAT0000247 | 19578358 |
| Serum | mmu-miR-145a-5p | MIMAT0000157 | 19578358 |
| Serum | mmu-miR-1a-3p | MIMAT0000123 | 15951802 |
| Serum | mmu-miR-1a-3p | MIMAT0000123 | 16380711 |
| Serum | mmu-miR-1a-3p | MIMAT0000123 | 16923828 |
| Serum | mmu-miR-206-3p | MIMAT0000239 | 16923828 |
| Serum | mmu-miR-486-5p | MIMAT0003130 | 20142475 |
| Serum | rno-miR-1-3p | MIMAT0003125 | 19775284 |
| Serum | rno-miR-200c-3p | MIMAT0000873 | 22144583 |
| Side-Population Cells | hsa-miR-520h | MIMAT0002867 | 20628378 |
| Skin | hsa-miR-125b-5p | MIMAT0000423 | 21412257 |
| Skin | hsa-miR-155-5p | MIMAT0000646 | 20673989 |
| Skin | hsa-miR-193b-3p | MIMAT0002819 | 20304954 |
| Skin | hsa-miR-200a-3p | MIMAT0000682 | 20827281 |
| Skin | hsa-miR-203a | MIMAT0000264 | 18483491 |
| Skin | hsa-miR-203a | MIMAT0000264 | 17622355 |
| Skin | hsa-miR-203a | MIMAT0000264 | 20827281 |
| Skin | hsa-miR-203a | MIMAT0000264 | 22917968 |
| Skin | hsa-miR-203a | MIMAT0000264 | 18311128 |
| Skin | hsa-miR-21-5p | MIMAT0000076 | 19672202 |
| Skin | hsa-miR-224-5p | MIMAT0000281 | 20827281 |
| Skin | hsa-miR-26a-5p | MIMAT0000082 | 20827281 |
| Skin | hsa-miR-27b-3p | MIMAT0000419 | 20827281 |
| Skin | hsa-miR-29a-3p | MIMAT0000086 | 20201077 |
| Skin | hsa-miR-29b-3p | MIMAT0000100 | 20201077 |
| Skin | hsa-miR-302b-3p | MIMAT0000715 | 19342891 |
| Skin | hsa-miR-31-5p | MIMAT0000089 | 23233723 |
| Skin | hsa-miR-335-5p | MIMAT0000765 | 21164520 |
| Skin | hsa-miR-424-5p | MIMAT0001341 | 21179471 |
| Skin | hsa-miR-433-3p | MIMAT0001627 | 20181727 |
| Skin | hsa-miR-532-5p | MIMAT0002888 | 19336521 |
| Skin | mmu-miR-122-5p | MIMAT0000246 | 16258535 |
| Skin | mmu-miR-203-3p | MIMAT0000236 | 18311128 |
| Skin | mmu-miR-31-5p | MIMAT0000538 | 20522784 |
| Somites | mmu-miR-137-3p | MIMAT0000149 | 21256124 |
| Somites | mmu-miR-153-3p | MIMAT0000163 | 21256124 |
| Somites | mmu-miR-363-3p | MIMAT0000708 | 21256124 |
| Spheroids Cellular | hsa-miR-299-5p | MIMAT0002890 | 19538464 |
| Spinal Cord | hsa-miR-124-3p | MIMAT0000422 | 17403776 |
| Spinal Cord | hsa-miR-124-3p | MIMAT0000422 | 23318130 |
| Spinal Cord | hsa-miR-128-3p | MIMAT0000424 | 17403776 |
| Spinal Cord | mmu-miR-124-3p | MIMAT0000134 | 17403776 |
| Spinal Cord | mmu-miR-219a-5p | MIMAT0000664 | 20223198 |
| Spinal Nerve Roots | hsa-miR-145-5p | MIMAT0000437 | 21276775 |
| Spinal Nerve Roots | hsa-miR-214-3p | MIMAT0000271 | 21276775 |
| Spine | hsa-miR-10a-5p | MIMAT0000253 | 20506192 |
| Spine | hsa-miR-125b-5p | MIMAT0000423 | 20159450 |
| Spine | hsa-miR-132-3p | MIMAT0000426 | 19850129 |
| Spine | mmu-miR-134-5p | MIMAT0000146 | 20126250 |
| Spine | mmu-miR-140-5p | MIMAT0000151 | 16828749 |
| Spine | rno-miR-134-5p | MIMAT0000840 | 16421561 |
| Spine | rno-miR-181a-5p | MIMAT0000858 | 22144581 |
| Spleen | hsa-miR-34a-5p | MIMAT0000255 | 20627091 |
| Spleen | hsa-miR-7-5p | MIMAT0000252 | 18823940 |
| Spleen | mmu-miR-122-5p | MIMAT0000246 | 21364282 |
| Spleen | mmu-miR-125b-5p | MIMAT0000136 | 21118986 |
| Stem Cell Niche | mmu-miR-124-3p | MIMAT0000134 | 19287386 |
| Stem Cells | bta-miR-130a | MIMAT0009223 | 17855557 |
| Stem Cells | bta-miR-335 | MIMAT0009291 | 18185580 |
| Stem Cells | cfa-miR-130a | MIMAT0006631 | 17855557 |
| Stem Cells | cfa-miR-335 | MIMAT0006624 | 18185580 |
| Stem Cells | dre-miR-130a | MIMAT0001826 | 17855557 |
| Stem Cells | hsa-let-7a-5p | MIMAT0000062 | 19878981 |
| Stem Cells | hsa-let-7b-5p | MIMAT0000063 | 20133835 |
| Stem Cells | hsa-let-7d-5p | MIMAT0000065 | 20410187 |
| Stem Cells | hsa-miR-1 | MIMAT0000416 | 20081117 |
| Stem Cells | hsa-miR-1 | MIMAT0000416 | 20956382 |
| Stem Cells | hsa-miR-100-5p | MIMAT0000098 | 22684006 |
| Stem Cells | hsa-miR-101-3p | MIMAT0000099 | 19818710 |
| Stem Cells | hsa-miR-106a-5p | MIMAT0000103 | 17589498 |
| Stem Cells | hsa-miR-124-3p | MIMAT0000422 | 20362537 |
| Stem Cells | hsa-miR-124-3p | MIMAT0000422 | 18577219 |
| Stem Cells | hsa-miR-125a-5p | MIMAT0000443 | 20616003 |
| Stem Cells | hsa-miR-125b-5p | MIMAT0000423 | 18230348 |
| Stem Cells | hsa-miR-125b-5p | MIMAT0000423 | 18756266 |
| Stem Cells | hsa-miR-125b-5p | MIMAT0000423 | 20216554 |
| Stem Cells | hsa-miR-126-3p | MIMAT0000445 | 18474618 |
| Stem Cells | hsa-miR-126-3p | MIMAT0000445 | 18832181 |
| Stem Cells | hsa-miR-126-3p | MIMAT0000445 | 22525256 |
| Stem Cells | hsa-miR-126-3p | MIMAT0000445 | 21304604 |
| Stem Cells | hsa-miR-128-3p | MIMAT0000424 | 20574517 |
| Stem Cells | hsa-miR-128-3p | MIMAT0000424 | 19409607 |
| Stem Cells | hsa-miR-128-3p | MIMAT0000424 | 19941032 |
| Stem Cells | hsa-miR-128-3p | MIMAT0000424 | 19010882 |
| Stem Cells | hsa-miR-129-5p | MIMAT0000242 | 18189265 |
| Stem Cells | hsa-miR-130a-3p | MIMAT0000425 | 17855557 |
| Stem Cells | hsa-miR-132-3p | MIMAT0000426 | 19819989 |
| Stem Cells | hsa-miR-133a-3p | MIMAT0000427 | 23069713 |
| Stem Cells | hsa-miR-133b | MIMAT0000770 | 19695767 |
| Stem Cells | hsa-miR-135b-5p | MIMAT0000758 | 19795981 |
| Stem Cells | hsa-miR-137 | MIMAT0000429 | 18577219 |
| Stem Cells | hsa-miR-137 | MIMAT0000429 | 22003227 |
| Stem Cells | hsa-miR-138-5p | MIMAT0000430 | 20486779 |
| Stem Cells | hsa-miR-141-3p | MIMAT0000432 | 19454767 |
| Stem Cells | hsa-miR-142-3p | MIMAT0000434 | 21394831 |
| Stem Cells | hsa-miR-144-3p | MIMAT0000436 | 21285251 |
| Stem Cells | hsa-miR-145-5p | MIMAT0000437 | 19409607 |
| Stem Cells | hsa-miR-145-5p | MIMAT0000437 | 21496429 |
| Stem Cells | hsa-miR-145-5p | MIMAT0000437 | 20382729 |
| Stem Cells | hsa-miR-145-5p | MIMAT0000437 | 18474618 |
| Stem Cells | hsa-miR-145-5p | MIMAT0000437 | 20668064 |
| Stem Cells | hsa-miR-145-5p | MIMAT0000437 | 21217773 |
| Stem Cells | hsa-miR-148a-3p | MIMAT0000243 | 19435428 |
| Stem Cells | hsa-miR-153-3p | MIMAT0000439 | 20668064 |
| Stem Cells | hsa-miR-155-5p | MIMAT0000646 | 18950466 |
| Stem Cells | hsa-miR-155-5p | MIMAT0000646 | 18299402 |
| Stem Cells | hsa-miR-155-5p | MIMAT0000646 | 20550618 |
| Stem Cells | hsa-miR-15a-5p | MIMAT0000068 | 21205891 |
| Stem Cells | hsa-miR-16-5p | MIMAT0000069 | 20668064 |
| Stem Cells | hsa-miR-16-5p | MIMAT0000069 | 20216554 |
| Stem Cells | hsa-miR-16-5p | MIMAT0000069 | 21205891 |
| Stem Cells | hsa-miR-17-5p | MIMAT0000070 | 17589498 |
| Stem Cells | hsa-miR-181a-5p | MIMAT0000256 | 19585654 |
| Stem Cells | hsa-miR-181b-5p | MIMAT0000257 | 19585654 |
| Stem Cells | hsa-miR-181c-5p | MIMAT0000258 | 19585654 |
| Stem Cells | hsa-miR-181d-5p | MIMAT0002821 | 19585654 |
| Stem Cells | hsa-miR-195-5p | MIMAT0000461 | 19823043 |
| Stem Cells | hsa-miR-196a-5p | MIMAT0000226 | 19063684 |
| Stem Cells | hsa-miR-199a-5p | MIMAT0000231 | 22441842 |
| Stem Cells | hsa-miR-199a-5p | MIMAT0000231 | 19818710 |
| Stem Cells | hsa-miR-199b-5p | MIMAT0000263 | 19308264 |
| Stem Cells | hsa-miR-199b-5p | MIMAT0000263 | 23354452 |
| Stem Cells | hsa-miR-19b-3p | MIMAT0000074 | 19435428 |
| Stem Cells | hsa-miR-200a-3p | MIMAT0000682 | 21529905 |
| Stem Cells | hsa-miR-200a-3p | MIMAT0000682 | 19454767 |
| Stem Cells | hsa-miR-200a-3p | MIMAT0000682 | 20827281 |
| Stem Cells | hsa-miR-200c-3p | MIMAT0000617 | 19665978 |
| Stem Cells | hsa-miR-200c-3p | MIMAT0000617 | 21294122 |
| Stem Cells | hsa-miR-200c-3p | MIMAT0000617 | 21207483 |
| Stem Cells | hsa-miR-203a | MIMAT0000264 | 20668064 |
| Stem Cells | hsa-miR-203a | MIMAT0000264 | 18483491 |
| Stem Cells | hsa-miR-203a | MIMAT0000264 | 20827281 |
| Stem Cells | hsa-miR-203a | MIMAT0000264 | 18311128 |
| Stem Cells | hsa-miR-206 | MIMAT0000462 | 20956382 |
| Stem Cells | hsa-miR-206 | MIMAT0000462 | 17855557 |
| Stem Cells | hsa-miR-20a-5p | MIMAT0000075 | 19435428 |
| Stem Cells | hsa-miR-20a-5p | MIMAT0000075 | 17589498 |
| Stem Cells | hsa-miR-21-5p | MIMAT0000076 | 19578724 |
| Stem Cells | hsa-miR-21-5p | MIMAT0000076 | 20216554 |
| Stem Cells | hsa-miR-21-5p | MIMAT0000076 | 19342589 |
| Stem Cells | hsa-miR-21-5p | MIMAT0000076 | 22072622 |
| Stem Cells | hsa-miR-21-5p | MIMAT0000076 | 21381024 |
| Stem Cells | hsa-miR-21-5p | MIMAT0000076 | 22528454 |
| Stem Cells | hsa-miR-21-5p | MIMAT0000076 | 19816956 |
| Stem Cells | hsa-miR-21-5p | MIMAT0000076 | 23239100 |
| Stem Cells | hsa-miR-21-5p | MIMAT0000076 | 19242418 |
| Stem Cells | hsa-miR-214-3p | MIMAT0000271 | 19435428 |
| Stem Cells | hsa-miR-214-3p | MIMAT0000271 | 19818710 |
| Stem Cells | hsa-miR-216a-5p | MIMAT0000273 | 20216554 |
| Stem Cells | hsa-miR-217 | MIMAT0000274 | 20216554 |
| Stem Cells | hsa-miR-217 | MIMAT0000274 | 20668064 |
| Stem Cells | hsa-miR-221-3p | MIMAT0000278 | 20018759 |
| Stem Cells | hsa-miR-222-3p | MIMAT0000279 | 20018759 |
| Stem Cells | hsa-miR-223-3p | MIMAT0000280 | 18278031 |
| Stem Cells | hsa-miR-223-3p | MIMAT0000280 | 19278969 |
| Stem Cells | hsa-miR-224-5p | MIMAT0000281 | 20827281 |
| Stem Cells | hsa-miR-24-3p | MIMAT0000080 | 17906079 |
| Stem Cells | hsa-miR-26a-5p | MIMAT0000082 | 20827281 |
| Stem Cells | hsa-miR-26a-5p | MIMAT0000082 | 20216554 |
| Stem Cells | hsa-miR-26a-5p | MIMAT0000082 | 18197755 |
| Stem Cells | hsa-miR-26b-5p | MIMAT0000083 | 20831567 |
| Stem Cells | hsa-miR-27a-3p | MIMAT0000084 | 19440384 |
| Stem Cells | hsa-miR-27a-3p | MIMAT0000084 | 19666532 |
| Stem Cells | hsa-miR-27b-3p | MIMAT0000419 | 19666532 |
| Stem Cells | hsa-miR-27b-3p | MIMAT0000419 | 20827281 |
| Stem Cells | hsa-miR-29a-3p | MIMAT0000086 | 21665270 |
| Stem Cells | hsa-miR-29b-3p | MIMAT0000100 | 23478036 |
| Stem Cells | hsa-miR-29b-3p | MIMAT0000100 | 21665270 |
| Stem Cells | hsa-miR-302a-3p | MIMAT0000684 | 21062975 |
| Stem Cells | hsa-miR-302a-3p | MIMAT0000684 | 21266536 |
| Stem Cells | hsa-miR-302a-3p | MIMAT0000684 | 21151097 |
| Stem Cells | hsa-miR-302a-3p | MIMAT0000684 | 23185040 |
| Stem Cells | hsa-miR-302a-3p | MIMAT0000684 | 19386261 |
| Stem Cells | hsa-miR-302a-3p | MIMAT0000684 | 17855557 |
| Stem Cells | hsa-miR-302b-3p | MIMAT0000715 | 21062975 |
| Stem Cells | hsa-miR-302b-3p | MIMAT0000715 | 23185040 |
| Stem Cells | hsa-miR-302c-3p | MIMAT0000717 | 21062975 |
| Stem Cells | hsa-miR-302c-3p | MIMAT0000717 | 23185040 |
| Stem Cells | hsa-miR-302d-3p | MIMAT0000718 | 21266536 |
| Stem Cells | hsa-miR-302d-3p | MIMAT0000718 | 21062975 |
| Stem Cells | hsa-miR-302d-3p | MIMAT0000718 | 23185040 |
| Stem Cells | hsa-miR-302d-3p | MIMAT0000718 | 19229866 |
| Stem Cells | hsa-miR-31-5p | MIMAT0000089 | 21048943 |
| Stem Cells | hsa-miR-320a | MIMAT0000510 | 17855557 |
| Stem Cells | hsa-miR-324-5p | MIMAT0000761 | 18756266 |
| Stem Cells | hsa-miR-324-5p | MIMAT0000761 | 20216554 |
| Stem Cells | hsa-miR-326 | MIMAT0000756 | 23341351 |
| Stem Cells | hsa-miR-326 | MIMAT0000756 | 20667897 |
| Stem Cells | hsa-miR-326 | MIMAT0000756 | 18756266 |
| Stem Cells | hsa-miR-326 | MIMAT0000756 | 20216554 |
| Stem Cells | hsa-miR-335-5p | MIMAT0000765 | 21164520 |
| Stem Cells | hsa-miR-335-5p | MIMAT0000765 | 18185580 |
| Stem Cells | hsa-miR-34a-5p | MIMAT0000255 | 18803879 |
| Stem Cells | hsa-miR-34a-5p | MIMAT0000255 | 21240262 |
| Stem Cells | hsa-miR-34a-5p | MIMAT0000255 | 21294122 |
| Stem Cells | hsa-miR-34a-5p | MIMAT0000255 | 19773441 |
| Stem Cells | hsa-miR-34a-5p | MIMAT0000255 | 17252019 |
| Stem Cells | hsa-miR-34b-3p | MIMAT0004676 | 18803879 |
| Stem Cells | hsa-miR-34b-5p | MIMAT0000685 | 18803879 |
| Stem Cells | hsa-miR-34c-5p | MIMAT0000686 | 18803879 |
| Stem Cells | hsa-miR-372-3p | MIMAT0000724 | 19229866 |
| Stem Cells | hsa-miR-372-3p | MIMAT0000724 | 20216554 |
| Stem Cells | hsa-miR-372-3p | MIMAT0000724 | 19823043 |
| Stem Cells | hsa-miR-373-3p | MIMAT0000726 | 20216554 |
| Stem Cells | hsa-miR-375 | MIMAT0000728 | 19807270 |
| Stem Cells | hsa-miR-380-5p | MIMAT0000734 | 20871609 |
| Stem Cells | hsa-miR-433-3p | MIMAT0001627 | 23353875 |
| Stem Cells | hsa-miR-489-3p | MIMAT0002805 | 19440384 |
| Stem Cells | hsa-miR-499a-5p | MIMAT0002870 | 20081117 |
| Stem Cells | hsa-miR-499b-5p | MIMAT0019897 | 20081117 |
| Stem Cells | hsa-miR-519c-3p | MIMAT0002832 | 19825807 |
| Stem Cells | hsa-miR-520h | MIMAT0002867 | 18189265 |
| Stem Cells | hsa-miR-520h | MIMAT0002867 | 19825807 |
| Stem Cells | hsa-miR-520h | MIMAT0002867 | 19435428 |
| Stem Cells | hsa-miR-522-3p | MIMAT0002868 | 21304604 |
| Stem Cells | hsa-miR-524-5p | MIMAT0002849 | 22871495 |
| Stem Cells | hsa-miR-637 | MIMAT0003307 | 21880893 |
| Stem Cells | hsa-miR-9-5p | MIMAT0000441 | 19330006 |
| Stem Cells | hsa-miR-9-5p | MIMAT0000441 | 20362537 |
| Stem Cells | hsa-miR-92a-3p | MIMAT0000092 | 19435428 |
| Stem Cells | hsa-miR-92b-3p | MIMAT0003218 | 19544458 |
| Stem Cells | hsa-miR-98-5p | MIMAT0000096 | 19818710 |
| Stem Cells | mmu-let-7a-5p | MIMAT0000521 | 19898466 |
| Stem Cells | mmu-let-7a-5p | MIMAT0000521 | 18474618 |
| Stem Cells | mmu-let-7b-5p | MIMAT0000522 | 20133835 |
| Stem Cells | mmu-let-7c-5p | MIMAT0000523 | 20054295 |
| Stem Cells | mmu-let-7e-5p | MIMAT0000524 | 19898466 |
| Stem Cells | mmu-miR-100-3p | MIMAT0017051 | 20439489 |
| Stem Cells | mrnu-miR-100-5p | MIMAT0000655 | 20439489 |
| Stem Cells | mmu-miR-106b-5p | MIMAT0000386 | 21285944 |
| Stem Cells | mmu-miR-10a-3p | MIMAT0004659 | 20118242 |
| Stem Cells | mmu-miR-10a-5p | MIMAT0000648 | 20118242 |
| Stem Cells | mmu-miR-124-3p | MIMAT0000134 | 19287386 |
| Stem Cells | mmu-miR-124-3p | MIMAT0000134 | 18577219 |
| Stem Cells | mmu-miR-124-3p | MIMAT0000134 | 17679093 |
| Stem Cells | mmu-miR-125a-5p | MIMAT0000135 | 19898466 |
| Stem Cells | mmu-miR-125b-5p | MIMAT0000136 | 19898466 |
| Stem Cells | mmu-miR-125b-5p | MIMAT0000136 | 21118986 |
| Stem Cells | mmu-miR-125b-5p | MIMAT0000136 | 20216554 |
| Stem Cells | mmu-miR-126a-3p | MIMAT0000138 | 20216554 |
| Stem Cells | mmu-miR-126a-3p | MIMAT0000138 | 18474618 |
| Stem Cells | mmu-miR-128-3p | MIMAT0000140 | 19898466 |
| Stem Cells | mmu-miR-134-5p | MIMAT0000146 | 17916804 |
| Stem Cells | mmu-miR-134-5p | MIMAT0000146 | 18806776 |
| Stem Cells | mmu-miR-137-3p | MIMAT0000149 | 20368621 |
| Stem Cells | mmu-miR-137-3p | MIMAT0000149 | 20439489 |
| Stem Cells | mmu-miR-137-3p | MIMAT0000149 | 18577219 |
| Stem Cells | mmu-miR-137-5p | MIMAT0016986 | 20439489 |
| Stem Cells | mmu-miR-137-5p | MIMAT0016986 | 18577219 |
| Stem Cells | mrnu-miR-141-3p | MIMAT0000153 | 19454767 |
| Stem Cells | mmu-miR-143-3p | MIMAT0000247 | 19578358 |
| Stem Cells | mrnu-miR-145a-5p | MIMAT0000157 | 18474618 |
| Stem Cells | mrnu-miR-145a-5p | MIMAT0000157 | 19578358 |
| Stem Cells | mmu-miR-146a-5p | MIMAT0000158 | 21730286 |
| Stem Cells | mmu-miR-17-5p | MIMAT0000649 | 17765889 |
| Stem Cells | mmu-miR-199a-3p | MIMAT0000230 | 19251704 |
| Stem Cells | mmu-miR-19b-3p | MIMAT0000513 | 21781967 |
| Stem Cells | mmu-miR-1a-3p | MIMAT0000123 | 20819939 |
| Stem Cells | mmu-miR-1a-3p | MIMAT0000123 | 19521018 |
| Stem Cells | mmu-miR-1a-3p | MIMAT0000123 | 19933931 |
| Stem Cells | mmu-miR-1a-3p | MIMAT0000123 | 20799856 |
| Stem Cells | mmu-miR-200a-3p | MIMAT0000519 | 19454767 |
| Stem Cells | mmu-miR-203-3p | MIMAT0000236 | 18311128 |
| Stem Cells | mmu-miR-203-3p | MIMAT0000236 | 20216554 |
| Stem Cells | mmu-miR-204-5p | MIMAT0000237 | 20039258 |
| Stem Cells | mmu-miR-205-5p | MIMAT0000238 | 20103531 |
| Stem Cells | mmu-miR-206-3p | MIMAT0000239 | 20819939 |
| Stem Cells | mmu-miR-211-5p | MIMAT0000668 | 20039258 |
| Stem Cells | mmu-miR-214-3p | MIMAT0000661 | 19818710 |
| Stem Cells | mmu-miR-21a-5p | MIMAT0000530 | 20216554 |
| Stem Cells | mmu-miR-221-3p | MIMAT0000669 | 20018759 |
| Stem Cells | mmu-miR-223-3p | MIMAT0000665 | 18278031 |
| Stem Cells | mmu-miR-23b-3p | MIMAT0000125 | 19582816 |
| Stem Cells | mmu-miR-23b-3p | MIMAT0000125 | 20216554 |
| Stem Cells | mmu-miR-24-3p | MIMAT0000219 | 19582816 |
| Stem Cells | mmu-miR-27b-3p | MIMAT0000126 | 19582816 |
| Stem Cells | mmu-miR-290a-3p | MIMAT0004572 | 19628328 |
| Stem Cells | mmu-miR-291a-3p | MIMAT0000368 | 19628328 |
| Stem Cells | mmu-miR-292-3p | MIMAT0000370 | 19628328 |
| Stem Cells | mmu-miR-293-3p | MIMAT0000371 | 19628328 |
| Stem Cells | mmu-miR-294-3p | MIMAT0000372 | 19628328 |
| Stem Cells | mmu-miR-295-3p | MIMAT0000373 | 19628328 |
| Stem Cells | mmu-miR-296-5p | MIMAT0000374 | 18806776 |
| Stem Cells | mmu-miR-29a-3p | MIMAT0000535 | 21665270 |
| Stem Cells | mmu-miR-29b-3p | MIMAT0000127 | 21665270 |
| Stem Cells | mmu-miR-324-5p | MIMAT0000555 | 20216554 |
| Stem Cells | mmu-miR-326-3p | MIMAT0000559 | 20216554 |
| Stem Cells | mmu-miR-34a-5p | MIMAT0000542 | 20424141 |
| Stem Cells | mmu-miR-466l-3p | MIMAT0005830 | 20410487 |
| Stem Cells | mmu-miR-470-5p | MIMAT0002111 | 18806776 |
| Stem Cells | mmu-miR-9-5p | MIMAT0000142 | 22465325 |
| Stem Cells | mmu-miR-9-5p | MIMAT0000142 | 21238922 |
| Stem Cells | mmu-miR-9-5p | MIMAT0000142 | 20362537 |
| Stem Cells | mmu-miR-93-5p | MIMAT0000540 | 21285944 |
| Stem Cells | ppy-miR-130a | MIMAT0015753 | 17855557 |
| Stem Cells | ppy-miR-335 | MIMAT0015837 | 18185580 |
| Stem Cells | ptr-miR-130a | MIMAT0008025 | 17855557 |
| Stem Cells | ptr-miR-335 | MIMAT0008104 | 18185580 |
| Stem Cells | rno-miR-133b-3p | MIMAT0003126 | 19695767 |
| Stem Cells | rno-miR-31a-5p | MIMAT0000810 | 23270756 |
| Stem Cells | rno-miR-335 | MIMAT0000575 | 18185580 |
| Stem Cells | rno-miR-9a-5p | MIMAT0000781 | 18987208 |
| Stem Cells | ssc-miR-130a | MIMAT0007758 | 17855557 |
| Stem Cells | ssc-miR-335 | MIMAT0013955 | 18185580 |
| Stem Cells | xtr-miR-130a | MIMAT0003591 | 17855557 |
| Sternum | mmu-miR-140-5p | MIMAT0000151 | 16828749 |
| Stomach | hsa-miR-106a-5p | MIMAT0000103 | 16461460 |
| Stomach | hsa-miR-181c-5p | MIMAT0000258 | 20080834 |
| Stomach | hsa-miR-20a-5p | MIMAT0000075 | 16461460 |
| Stomach | hsa-miR-21-5p | MIMAT0000076 | 18372920 |
| Stomach | hsa-miR-26a-5p | MIMAT0000082 | 16461460 |
| Stomach | hsa-miR-34a-5p | MIMAT0000255 | 21240262 |
| Stomach | mmu-miR-21a-5p | MIMAT0000530 | 18372920 |
| Stress Fibers | hsa-miR-124-3p | MIMAT0000422 | 21672940 |
| Stress Fibers | hsa-miR-138-5p | MIMAT0000430 | 20232393 |
| Stress Fibers | hsa-miR-200b-3p | MIMAT0000318 | 22144583 |
| Stress Fibers | hsa-miR-21-5p | MIMAT0000076 | 21347332 |
| Stress Fibers | rno-miR-200c-3p | MIMAT0000873 | 22144583 |
| Stromal Cells | hsa-let-7f-5p | MIMAT0000067 | 22407818 |
| Stromal Cells | hsa-miR-125a-5p | MIMAT0000443 | 19011087 |
| Stromal Cells | hsa-miR-125b-5p | MIMAT0000423 | 19011087 |
| Stromal Cells | hsa-miR-196b-5p | MIMAT0001080 | 23293219 |
| Stromal Cells | hsa-miR-199a-5p | MIMAT0000231 | 19011087 |
| Stromal Cells | hsa-miR-199a-5p | MIMAT0000231 | 22441842 |
| Stromal Cells | hsa-miR-222-3p | MIMAT0000279 | 19589872 |
| Stromal Cells | hsa-miR-26a-5p | MIMAT0000082 | 19011087 |
| Stromal Cells | hsa-miR-346 | MIMAT0000773 | 19011087 |
| Stromal Cells | hsa-miR-369-5p | MIMAT0001621 | 21136442 |
| Stromal Cells | mmu-miR-21a-5p | MIMAT0000530 | 18556655 |
| Stromal Cells | mmu-miR-2861 | MIMAT0013803 | 19920351 |
| Stromal Cells | mmu-miR-3960 | MIMAT0019336 | 21324897 |
| Subcutaneous Fat | hsa-miR-519d-3p | MIMAT0002853 | 20057369 |
| Submandibular Gland | mmu-miR-21a-5p | MIMAT0000530 | 21295561 |
| Suprachiasmatic Nucleus | bta-miR-132 | MIMAT0003812 | 17553428 |
| Suprachiasmatic Nucleus | bta-miR-219 | MIMAT0030444 | 17553428 |
| Suprachiasmatic Nucleus | cfa-miR-132 | MIMAT0006732 | 17553428 |
| Suprachiasmatic Nucleus | dre-miR-219 | MIMAT0001286 | 17553428 |
| Suprachiasmatic Nucleus | mml-miR-219 | MIMAT0002575 | 17553428 |
| Suprachiasmatic Nucleus | mmu-miR-132-3p | MIMAT0000144 | 17553428 |
| Suprachiasmatic Nucleus | mmu-miR-132-3p | MIMAT0000144 | 21118894 |
| Suprachiasmatic Nucleus | mmu-miR-132-5p | MIMAT0016984 | 21118894 |
| Suprachiasmatic Nucleus | mmu-miR-219a-5p | MIMAT0000664 | 17553428 |
| Suprachiasmatic Nucleus | mmu-miR-7b-5p | MIMAT0000678 | 17028171 |
| Suprachiasmatic Nucleus | ppy-miR-132 | MIMAT0015755 | 17553428 |
| Suprachiasmatic Nucleus | ppy-miR-219 | MIMAT0002577 | 17553428 |
| Suprachiasmatic Nucleus | ssc-miR-132 | MIMAT0025361 | 17553428 |
| Suprachiasmatic Nucleus | ssc-miR-219 | MIMAT0020590 | 17553428 |
| Suprachiasmatic Nucleus | xtr-miR-132 | MIMAT0003594 | 17553428 |
| Suprachiasmatic Nucleus | xtr-miR-219 | MIMAT0003632 | 17553428 |
| Sympathetic Nervous | hsa-miR-152-3p | MIMAT0000438 | 20841484 |
| System | | | |
| Sympathetic Nervous | hsa-miR-184 | MIMAT0000454 | 20409325 |
| System | | | |
| Sympathetic Nervous | hsa-miR-18a-5p | MIMAT0000072 | 20080637 |
| System | | | |
| Sympathetic Nervous | hsa-miR-19a-3p | MIMAT0000073 | 20080637 |
| System | | | |
| Sympathetic Nervous | hsa-miR-34a-5p | MIMAT0000255 | 21266077 |
| System | | | |
| Synapses | hsa-miR-137 | MIMAT0000429 | 22003227 |
| Synapses | mmu-miR-206-3p | MIMAT0000239 | 20007902 |
| Synapses | mmu-miR-34a-5p | MIMAT0000542 | 18835850 |
| Synapses | rno-miR-138-5p | MIMAT0000844 | 20064393 |
| Synapses | rno-miR-181a-5p | MIMAT0000858 | 22144581 |
| Synovial Fluid | hsa-miR-146a-5p | MIMAT0000449 | 20459811 |
| T-Lymphocytes | hsa-let-7d-5p | MIMAT0000065 | 21616524 |
| T-Lymphocytes | hsa-let-7f-5p | MIMAT0000067 | 21616524 |
| T-Lymphocytes | hsa-let-7g-5p | MIMAT0000414 | 21616524 |
| T-Lymphocytes | hsa-let-7i-5p | MIMAT0000415 | 21616524 |
| T-Lymphocytes | hsa-miR-106a-5p | MIMAT0000103 | 17575136 |
| T-Lymphocytes | hsa-miR-125a-5p | MIMAT0000443 | 20589685 |
| T-Lymphocytes | hsa-miR-126-3p | MIMAT0000445 | 21165896 |
| T-Lymphocytes | hsa-miR-130b-3p | MIMAT0000691 | 18974142 |
| T-Lymphocytes | hsa-miR-143-3p | MIMAT0000435 | 19464056 |
| T-Lymphocytes | hsa-miR-146a-5p | MIMAT0000449 | 19965651 |
| T-Lymphocytes | hsa-miR-146a-5p | MIMAT0000449 | 20459811 |
| T-Lymphocytes | hsa-miR-148a-3p | MIMAT0000243 | 19435428 |
| T-Lymphocytes | hsa-miR-148a-3p | MIMAT0000243 | 20483747 |
| T-Lymphocytes | hsa-miR-155-5p | MIMAT0000646 | 21310411 |
| T-Lymphocytes | hsa-miR-155-5p | MIMAT0000646 | 20673989 |
| T-Lymphocytes | hsa-miR-155-5p | MIMAT0000646 | 20209161 |
| T-Lymphocytes | hsa-miR-155-5p | MIMAT0000646 | 20680360 |
| T-Lymphocytes | hsa-miR-155-5p | MIMAT0000646 | 21304824 |
| T-Lymphocytes | hsa-miR-155-5p | MIMAT0000646 | 22387553 |
| T-Lymphocytes | hsa-miR-181c-5p | MIMAT0000258 | 21112091 |
| T-Lymphocytes | hsa-miR-184 | MIMAT0000454 | 19286996 |
| T-Lymphocytes | hsa-miR-19b-3p | MIMAT0000074 | 19435428 |
| T-Lymphocytes | hsa-miR-19b-3p | MIMAT0000074 | 17575136 |
| T-Lymphocytes | hsa-miR-20a-5p | MIMAT0000075 | 19435428 |
| T-Lymphocytes | hsa-miR-20b-5p | MIMAT0001413 | 17575136 |
| T-Lymphocytes | hsa-miR-21-5p | MIMAT0000076 | 22387553 |
| T-Lymphocytes | hsa-miR-21-5p | MIMAT0000076 | 21469086 |
| T-Lymphocytes | hsa-miR-21-5p | MIMAT0000076 | 20483747 |
| T-Lymphocytes | hsa-miR-21-5p | MIMAT0000076 | 23416424 |
| T-Lymphocytes | hsa-miR-214-3p | MIMAT0000271 | 19435428 |
| T-Lymphocytes | hsa-miR-214-3p | MIMAT0000271 | 20548023 |
| T-Lymphocytes | hsa-miR-221-3p | MIMAT0000278 | 20110463 |
| T-Lymphocytes | hsa-miR-222-3p | MIMAT0000279 | 23522449 |
| T-Lymphocytes | hsa-miR-26a-5p | MIMAT0000082 | 23338972 |
| T-Lymphocytes | hsa-miR-29a-3p | MIMAT0000086 | 19584290 |
| T-Lymphocytes | hsa-miR-30b-5p | MIMAT0000420 | 22387553 |
| T-Lymphocytes | hsa-miR-31-3p | MIMAT0004504 | 19408243 |
| T-Lymphocytes | hsa-miR-31-5p | MIMAT0000089 | 19408243 |
| T-Lymphocytes | hsa-miR-520h | MIMAT0002867 | 19435428 |
| T-Lymphocytes | hsa-miR-92a-3p | MIMAT0000092 | 17575136 |
| T-Lymphocytes | hsa-miR-92a-3p | MIMAT0000092 | 19435428 |
| T-Lymphocytes | hsa-miR-93-5p | MIMAT0000093 | 18974142 |
| T-Lymphocytes | hsa-miR-98-5p | MIMAT0000096 | 20589685 |
| T-Lymphocytes | hsa-miR-98-5p | MIMAT0000096 | 21616524 |
| T-Lymphocytes | mmu-miR-106a-5p | MIMAT0000385 | 17575136 |
| T-Lymphocytes | mmu-miR-124-3p | MIMAT0000134 | 21131957 |
| T-Lymphocytes | mmu-miR-125b-5p | MIMAT0000136 | 21118986 |
| T-Lymphocytes | mmu-miR-133a-3p | MIMAT0000145 | 20173049 |
| T-Lymphocytes | mmu-miR-142-3p | MIMAT0000155 | 19098714 |
| T-Lymphocytes | mmu-miR-155-5p | MIMAT0000165 | 19144316 |
| T-Lymphocytes | mmu-miR-155-5p | MIMAT0000165 | 17463290 |
| T-Lymphocytes | mmu-miR-155-5p | MIMAT0000165 | 21149603 |
| T-Lymphocytes | mmu-miR-181a-5p | MIMAT0000210 | 17344418 |
| T-Lymphocytes | mmu-miR-19b-3p | MIMAT0000513 | 17575136 |
| T-Lymphocytes | mmu-miR-20b-5p | MIMAT0003187 | 17575136 |
| T-Lymphocytes | mmu-miR-214-3p | MIMAT0000661 | 20548023 |
| T-Lymphocytes | mmu-miR-92a-3p | MIMAT0000539 | 17575136 |
| T-Lymphocytes | rno-miR-23a-3p | MIMAT0000792 | 19574461 |
| T-Lymphocytes | rno-miR-27a-3p | MIMAT0000799 | 19574461 |
| T-Lymphocytes Helper- | hsa-miR-21-5p | MIMAT0000076 | 23416424 |
| Inducer | | | |
| T-Lymphocytes Helper- | mmu-miR-326-3p | MIMAT0000559 | 19838199 |
| Inducer | | | |
| T-Lymphocytes Regulatory | hsa-let-7i-5p | MIMAT0000415 | 21742974 |
| T-Lymphocytes Regulatory | hsa-miR-155-5p | MIMAT0000646 | 20209161 |
| T-Lymphocytes Regulatory | hsa-miR-155-5p | MIMAT0000646 | 21304824 |
| T-Lymphocytes Regulatory | hsa-miR-21-5p | MIMAT0000076 | 23416424 |
| T-Lymphocytes Regulatory | mmu-miR-142-3p | MIMAT0000155 | 19098714 |
| T-Lymphocytes Regulatory | mmu-miR-146a-5p | MIMAT0000158 | 20850013 |
| T-Lymphocytes Regulatory | mmu-miR-155-5p | MIMAT0000165 | 19144316 |
| T-Lymphocytes Regulatory | mmu-miR-155-5p | MIMAT0000165 | 21149603 |
| Telencephalon | mmu-miR-9-5p | MIMAT0000142 | 18842901 |
| Testis | hsa-miR-383-5p | MIMAT0000738 | 21368870 |
| Testis | mmu-miR-709 | MIMAT0003499 | 19029807 |
| Thymus Gland | hsa-miR-433-3p | MIMAT0001627 | 20181727 |
| Thymus Gland | hsa-miR-7-5p | MIMAT0000252 | 18823940 |
| Thymus Gland | mmu-miR-29a-3p | MIMAT0000535 | 19959559 |
| Thymus Gland | mmu-miR-29b-3p | MIMAT0000127 | 19959559 |
| Thymus Gland | mmu-miR-468-3p | MIMAT0002109 | 19959559 |
| Thyroid Gland | hsa-let-7f-5p | MIMAT0000067 | 19956384 |
| Thyroid Gland | hsa-miR-125b-5p | MIMAT0000423 | 17563749 |
| Thyroid Gland | hsa-miR-138-5p | MIMAT0000430 | 18201269 |
| Thyroid Gland | hsa-miR-146a-5p | MIMAT0000449 | 20061417 |
| Thyroid Gland | hsa-miR-146b-5p | MIMAT0002809 | 16365291 |
| Thyroid Gland | hsa-miR-192-5p | MIMAT0000222 | 16822819 |
| Thyroid Gland | hsa-miR-197-3p | MIMAT0000227 | 16822819 |
| Thyroid Gland | hsa-miR-204-5p | MIMAT0000265 | 20691260 |
| Thyroid Gland | hsa-miR-206 | MIMAT0000462 | 20388878 |
| Thyroid Gland | hsa-miR-221-3p | MIMAT0000278 | 20388878 |
| Thyroid Gland | hsa-miR-221-3p | MIMAT0000278 | 16365291 |
| Thyroid Gland | hsa-miR-222-3p | MIMAT0000279 | 20388878 |
| Thyroid Gland | hsa-miR-222-3p | MIMAT0000279 | 16365291 |
| Thyroid Gland | hsa-miR-26a-5p | MIMAT0000082 | 17563749 |
| Thyroid Gland | hsa-miR-27a-3p | MIMAT0000084 | 21149577 |
| Thyroid Gland | hsa-miR-320a | MIMAT0000510 | 19164563 |
| Thyroid Gland | hsa-miR-346 | MIMAT0000773 | 16822819 |
| Thyroid Gland | rno-miR-27a-3p | MIMAT0000799 | 21149577 |
| Thyroid Gland | rno-miR-34a-5p | MIMAT0000815 | 18704095 |
| Tight Junctions | hsa-miR-1 | MIMAT0000416 | 23142026 |
| Tight Junctions | hsa-miR-155-5p | MIMAT0000646 | 18794355 |
| Tight Junctions | hsa-miR-203a | MIMAT0000264 | 22101077 |
| Tight Junctions | hsa-miR-212-3p | MIMAT0000269 | 18162065 |
| Tight Junctions | hsa-miR-483-3p | MIMAT0002173 | 22101077 |
| Tight Junctions | hsa-miR-595 | MIMAT0003263 | 22101077 |
| Tight Junctions | mmu-miR-155-5p | MIMAT0000165 | 18794355 |
| Tongue | hsa-miR-133a-3p | MIMAT0000427 | 18464261 |
| Tongue | hsa-miR-133b | MIMAT0000770 | 18464261 |
| Tongue | hsa-miR-138-5p | MIMAT0000430 | 20232393 |
| Tongue | hsa-miR-138-5p | MIMAT0000430 | 20819078 |
| Tongue | hsa-miR-222-3p | MIMAT0000279 | 19487542 |
| Tongue | hsa-miR-24-3p | MIMAT0000080 | 20816961 |
| Tongue | hsa-miR-7-5p | MIMAT0000252 | 20819078 |
| Trabecular Meshwork | hsa-miR-106a-5p | MIMAT0000103 | 19782699 |
| Trabecular Meshwork | hsa-miR-182-5p | MIMAT0000259 | 19782699 |
| Trabecular Meshwork | hsa-miR-183-5p | MIMAT0000261 | 19940135 |
| Trabecular Meshwork | hsa-miR-24-3p | MIMAT0000080 | 20945401 |
| Trabecular Meshwork | hsa-miR-29b-3p | MIMAT0000100 | 19956414 |
| Trachea | mmu-miR-125b-5p | MIMAT0000136 | 21945074 |
| Trachea | mmu-miR-30a-5p | MIMAT0000128 | 21945074 |
| Trachea | mmu-miR-30c-5p | MIMAT0000514 | 21945074 |
| Trophoblasts | hsa-miR-106a-5p | MIMAT0000103 | 23438603 |
| Trophoblasts | hsa-miR-199b-5p | MIMAT0000263 | 19900756 |
| Trophoblasts | hsa-miR-19b-3p | MIMAT0000074 | 23438603 |
| Trophoblasts | hsa-miR-205-5p | MIMAT0000266 | 20065103 |
| Trophoblasts | hsa-miR-224-5p | MIMAT0000281 | 20065103 |
| Trophoblasts | hsa-miR-335-5p | MIMAT0000765 | 20065103 |
| Trophoblasts | hsa-miR-34a-5p | MIMAT0000255 | 20351093 |
| Trophoblasts | hsa-miR-424-5p | MIMAT0001341 | 20065103 |
| Trophoblasts | hsa-miR-491-5p | MIMAT0002807 | 20065103 |
| Trophoblasts | hsa-miR-93-5p | MIMAT0000093 | 20065103 |
| Umbilical Cord | hsa-miR-129-5p | MIMAT0000242 | 18189265 |
| Umbilical Cord | hsa-miR-135b-5p | MIMAT0000758 | 19795981 |
| Umbilical Cord | hsa-miR-148a-3p | MIMAT0000243 | 19435428 |
| Umbilical Cord | hsa-miR-184 | MIMAT0000454 | 19286996 |
| Umbilical Cord | hsa-miR-19b-3p | MIMAT0000074 | 19435428 |
| Umbilical Cord | hsa-miR-20a-5p | MIMAT0000075 | 19435428 |
| Umbilical Cord | hsa-miR-214-3p | MIMAT0000271 | 19435428 |
| Umbilical Cord | hsa-miR-34a-5p | MIMAT0000255 | 20627091 |
| Umbilical Cord | hsa-miR-520h | MIMAT0002867 | 19435428 |
| Umbilical Cord | hsa-miR-520h | MIMAT0002867 | 18189265 |
| Umbilical Cord | hsa-miR-92a-3p | MIMAT0000092 | 19435428 |
| Umbilical Veins | hsa-miR-155-5p | MIMAT0000646 | 21310411 |
| Umbilical Veins | hsa-miR-155-5p | MIMAT0000646 | 23108656 |
| Umbilical Veins | hsa-miR-19a-3p | MIMAT0000073 | 20133739 |
| Umbilical Veins | hsa-miR-216a-5p | MIMAT0000273 | 19786632 |
| Umbilical Veins | hsa-miR-217 | MIMAT0000274 | 19786632 |
| Umbilical Veins | hsa-miR-409-3p | MIMAT0001639 | 22531314 |
| Umbilical Veins | hsa-miR-519c-3p | MIMAT0002832 | 20233879 |
| Urinary Bladder | hsa-miR-100-5p | MIMAT0000098 | 19843843 |
| Urinary Bladder | hsa-miR-101-3p | MIMAT0000099 | 19258506 |
| Urinary Bladder | hsa-miR-125b-5p | MIMAT0000423 | 20549700 |
| Urinary Bladder | hsa-miR-125b-5p | MIMAT0000423 | 19378336 |
| Urinary Bladder | hsa-miR-129-5p | MIMAT0000242 | 19487295 |
| Urinary Bladder | hsa-miR-133a-3p | MIMAT0000427 | 19378336 |
| Urinary Bladder | hsa-miR-133a-3p | MIMAT0000427 | 20160723 |
| Urinary Bladder | hsa-miR-143-3p | MIMAT0000435 | 23104321 |
| Urinary Bladder | hsa-miR-143-3p | MIMAT0000435 | 19157460 |
| Urinary Bladder | hsa-miR-145-5p | MIMAT0000437 | 21360565 |
| Urinary Bladder | hsa-miR-145-5p | MIMAT0000437 | 23104321 |
| Urinary Bladder | hsa-miR-145-5p | MIMAT0000437 | 19915607 |
| Urinary Bladder | hsa-miR-145-5p | MIMAT0000437 | 19378336 |
| Urinary Bladder | hsa-miR-145-5p | MIMAT0000437 | 20160723 |
| Urinary Bladder | hsa-miR-195-5p | MIMAT0000461 | 22265971 |
| Urinary Bladder | hsa-miR-195-5p | MIMAT0000461 | 19378336 |
| Urinary Bladder | hsa-miR-199a-3p | MIMAT0000232 | 21807947 |
| Urinary Bladder | hsa-miR-199a-3p | MIMAT0000232 | 19378336 |
| Urinary Bladder | hsa-miR-200b-3p | MIMAT0000318 | 19671845 |
| Urinary Bladder | hsa-miR-200c-3p | MIMAT0000617 | 19671845 |
| Urinary Bladder | hsa-miR-203a | MIMAT0000264 | 21205209 |
| Urinary Bladder | hsa-miR-21-5p | MIMAT0000076 | 21468550 |
| Urinary Bladder | hsa-miR-30a-3p | MIMAT0000088 | 19378336 |
| Urinary Bladder | hsa-miR-30a-5p | MIMAT0000087 | 19378336 |
| Urinary Bladder | hsa-miR-34a-5p | MIMAT0000255 | 21240262 |
| Urinary Bladder | hsa-miR-429 | MIMAT0001536 | 19671845 |
| Urinary Bladder | hsa-miR-99a-5p | MIMAT0000097 | 19843843 |
| Urothelium | hsa-miR-100-5p | MIMAT0000098 | 19843843 |
| Urothelium | hsa-miR-125b-5p | MIMAT0000423 | 20549700 |
| Urothelium | hsa-miR-129-5p | MIMAT0000242 | 19487295 |
| Urothelium | hsa-miR-145-5p | MIMAT0000437 | 19915607 |
| Urothelium | hsa-miR-99a-5p | MIMAT0000097 | 19843843 |
| Uterus | mmu-miR-101a-3p | MIMAT0000133 | 17848513 |
| Uterus | mmu-miR-199a-3p | MIMAT0000230 | 17848513 |
| Uterus | mmu-miR-21a-5p | MIMAT0000530 | 18556655 |
| Veins | hsa-miR-140-5p | MIMAT0000431 | 23401231 |
| Veins | hsa-miR-146a-5p | MIMAT0000449 | 22711166 |
| Veins | hsa-miR-155-5p | MIMAT0000646 | 23108656 |
| Veins | hsa-miR-16-5p | MIMAT0000069 | 19738602 |
| Veins | hsa-miR-328-3p | MIMAT0000752 | 18560585 |
| Veins | hsa-miR-328-5p | MIMAT0026486 | 18560585 |
| Veins | hsa-miR-409-3p | MIMAT0001639 | 22531314 |
| X Chromosome | hsa-miR-106a-5p | MIMAT0000103 | 17575136 |
| X Chromosome | hsa-miR-19b-3p | MIMAT0000074 | 17575136 |
| X Chromosome | hsa-miR-20b-5p | MIMAT0001413 | 17575136 |
| X Chromosome | hsa-miR-221-3p | MIMAT0000278 | 17721077 |
| X Chromosome | hsa-miR-222-3p | MIMAT0000279 | 17721077 |
| X Chromosome | hsa-miR-92a-3p | MIMAT0000092 | 17575136 |
| X Chromosome | mmu-miR-106a-5p | MIMAT0000385 | 17575136 |
| X Chromosome | mmu-miR-19b-3p | MIMAT0000513 | 17575136 |
| X Chromosome | mmu-miR-20b-5p | MIMAT0003187 | 17575136 |
| X Chromosome | mmu-miR-92a-3p | MIMAT0000539 | 17575136 |

TABLE I
IncRNA-chromatin interaction data - H. sapiens, taken from Supp. Table 1 of
Zhang et al, JBC 2019, doi: 10.1074/jbc.RA119.008732; jbc.RA119.008732.
LncRNA-chromatin interaction data in human

| | | | | | IncRNA | |
|---|---|---|---|---|---|---|
| | | | | | control | |
| | | Detected | Cell Type | IncRNA IP | sample | |
| IncRNA | Method | Cell type | Description | sample ID | ID | PMID |
| HOTAIR | ChlRP- | MDAMB2 | Breast | GSM820433, | GSM820435 | 21963238 |
| | Seq | 31 | Cancer | GSM820434 | | |
| LED | ChlRP- | MCF7 | Breast | GSM1294974, | GSM1294973 | 25813522 |
| | Seq | with | Cancer | GSM1294975 | | |
| | | nutlin-3a | | | | |
| MEG3 | ChOP- | BT-549 | Breast | PRJEB7307 | | 26205790 |
| | seq | | Cancer | | | |
| MALAT1 | CHART- | MCF7 | Breast | GSM1411209, | GSM1411212 | 25155612 |
| | seq | | Cancer | GSM1411210 | | |
| NEAT1 | CHART- | MCF7 | Breast | GSM1411207, | GSM1411211 | 25155612 |
| | seq | | Cancer | GSM1411208 | | |
| 7SK | ChlRP- | HeLaS3 | Cervical | GSM1693801, | GSM1693803 | 26878240 |
| | Seq | | cancer | GSM1693802 | | |
| TERC | ChlRP- | HeLaS3 | Cervical | GSM820437, | GSM820432 | 21963238 |
| | Seq | | cancer | GSM820438 | | |
| *DACOR1 | ChlRP- | V852 | Colon | GSM1854427 | GSM1854426 | 26307088 |
| | Seq | | cancer | (1 run) | | |
| SNHG1 | ChlRP- | HCT116 | Colon | GSM2285442, | GSM2285451, | 28825722 |
| | Seq | | cancer | GSM2285443, | GSM2285452, | |
| | | | | GSM2285444, | GSM2285453 | |
| | | | | GSM2285445, | | |
| | | | | GSM2285446, | | |
| | | | | GSM2285447 | | |
| DINO | ChlRP- | U2OS | Human | GSM2011201, | GSM2011205 | 27668660 |
| | Seq | | Bone | GSM2011202 | | |
| | | | Osteosarcoma | | | |
| | | | Epithelial | | | |
| | | | Cells | | | |
| 7SK | ChlRP- | H1 | Embryonic | GSM1693798, | GSM1693800 | 26878240 |
| | Seq | | stem cell | GSM1693799 | | |
| SRA | ChlRP- | NTERA2 | Pluripotent | GSM1415922 | GSM1415924 | 26496121 |
| | Seq | | human | (3 runs) | | |
| | | | embryonal | | | |
| | | | carcinoma | | | |
| | | | cell line | | | |
| *Long | ChlRP- | Erythroblast | Blood | GSM2449980, | GSM2449979 | 28132025 |
| noncoding | Seq | | | GSM2449981 | | |
| RNAs | | | | | | |
| transcribed | | | | | | |
| by | | | | | | |
| ERV-9 | | | | | | |
| LTR retro- | | | | | | |
| transposon | | | | | | |

TABLE J
De novo lncRNA binding motifs discovered
in human lncRNA-chromatin interaction
data - H. sapiens, taken from Supp. Table
2 of Zhang et al, JBC 2019 doi: 10.1074/
jbc.RA119.008732; jbc.RA119.008732.

| | | | # of | |
|---|---|---|---|---|
| | | | Matched | SEQ |
| | denovo | | motif | ID |
| | motif | | instance | NO: |
| lncRNA | (Homer) | p−value | (Fimo) | (#) |
| HOTAIR. | GGCATTTCTGGT | 1.00E−123 | 3 | 481 |
| MDAMB231 | | | | |
| | CAAGACCAGAGA | 1.00E−101 | 5 | 482 |
| | ATGGGAGGCGCA | 1.00E−93 | 1 | 483 |
| | GCAGAGAAAAGG | 1.00E−90 | 14 | 484 |
| | GTTTGGGCCTCC | 1.00E−87 | 6 | 485 |
| | CCTGTATGGAAC | 1.00E−81 | 1 | 486 |
| | GTGTCTACATGC | 1.00E−71 | 2 | 487 |
| | CAGGAGGAAGTT | 1.00E−67 | 1 | 488 |
| | AGAAAAGGCTGA | 1.00E−65 | 10 | 489 |
| | TGGAACAAGCAT | 1.00E−64 | 2 | 490 |
| | AGGAGGAAGTTC | 1.00E−58 | 5 | 491 |
| | AGAGCAAGGAAG | 1.00E−54 | 9 | 492 |
| | GGAGGGGCGTCT | 1.00E−51 | 4 | 493 |
| | GGCCCCAAAGAG | 1.00E−45 | 8 | 494 |
| | AGGAGGCCCAAA | 1.00E−42 | 3 | 495 |
| | TTAGCGCCTCCC | 1.00E−42 | 1 | 496 |
| | GGGCTGGTTTCA | 1.00E−40 | 5 | 497 |
| | TAACTGGCAGCA | 1.00E−38 | 2 | 498 |
| | ACATGCATCACT | 1.00E−35 | 1 | 499 |
| | KGACTTWGCACT | 1.00E−32 | 1 | 500 |
| | GTGCTGATTCCT | 1.00E−27 | 1 | 501 |
| | CACTGCCAACCC | 1.00E−25 | 7 | 502 |
| | GGGACAAAAGTT | 1.00E−23 | 4 | 503 |
| | TTTCTGACACTG | 1.00E−23 | 1 | 504 |
| | CAGAGAAAGGCT | 1.00E−15 | 5 | 505 |
| MEG3. | GAGAGAGAGAGA | 1.00E−35 | 76 | 506 |
| BT549 | | | | |
| | GTGTGTGTGTGT | 1.00E−23 | 97 | 507 |
| | TGTATGTGTGTG | 1.00E−19 | 77 | 508 |
| | CAYWGTGTGTGT | 1.00E−12 | 55 | 509 |
| | CGGGGTCGBAGC | 1.00E−11 | 8 | 510 |
| | GTTTTTCTAGAA | 1.00E−09 | 9 | 511 |
| | ATCATATCAAAA | 1.00E−08 | 5 | 512 |
| | AGAACAGATGTA | 1.00E−08 | 1 | 513 |
| | TGTGTTTCTTCA | 1.00E−07 | 12 | 514 |
| | GGTTTTTCACCT | 1.00E−07 | 7 | 515 |
| | ATAGAAAGAAAT | 1.00E−07 | 21 | 516 |
| | TSTMTCTGTMTG | 1.00E−07 | 20 | 517 |
| | GMTCMTATCTAT | 1.00E−07 | 3 | 518 |
| | GGGGGGGGGGGG | 1.00E−04 | 72 | 519 |
| | TATATATATATA | 1.00E−04 | 9 | 520 |
| | TCTCTCTCTTTT | 1.00E−02 | 45 | 521 |
| | TCTTTCCTTCCT | 1.00E−01 | 54 | 522 |
| 7SK.H1 | KGGCTGGCTGGC | 1e−625 | 3 | 523 |
| | ATCTGTCACCCC | 1.00E−271 | 1 | 524 |
| | GACTCCAGACAC | 1.00E−249 | 1 | 525 |
| | TCCAGACACATC | 1.00E−221 | 1 | 526 |
| | CACATGGAGCNG | 1.00E−184 | 2 | 527 |
| | AGACTCCAGACM | 1.00E−170 | 1 | 528 |
| | GCCCTCACATCC | 1.00E−159 | NA | 529 |
| | GGGACGCACATG | 1.00E−153 | 1 | 530 |
| | BCCAGATCAGCC | 1.00E−152 | 2 | 531 |
| | CCTAGCCAGCCR | 1.00E−149 | 1 | 532 |
| | NCAARACTHCAS | 1.00E−147 | 1 | 533 |
| | CCCTACGTTCTC | 1.00E−130 | 1 | 534 |
| | TGTCACCCCATT | 1.00E−130 | 1 | 535 |
| | TGGACCTTGAGA | 1.00E−98 | 1 | 536 |
| | TACAATGGACCT | 1.00E−89 | 1 | 537 |
| | AGCTCTCAAGGT | 1.00E−75 | 1 | 538 |
| | ARCGTAGGGTAG | 1.00E−68 | 1 | 539 |
| | SATGGAGCGGTG | 1.00E−51 | 1 | 540 |
| | AAGAGGACGACC | 1.00E−41 | 2 | 541 |
| | TGACTACCCTAC | 1.00E−38 | 1 | 542 |
| | GGACCTTGGAGC | 1.00E−37 | NA | 543 |
| | GCACTGGAGCGG | 1.00E−33 | NA | 544 |
| | TGGCTGGYGTAG | 1.00E−33 | NA | 545 |
| | GGGCCACCATCA | 1.00E−28 | NA | 546 |
| | TTGTGCAGCCTC | 1.00E−24 | NA | 547 |
| 7SK. | GCCAGCCAGMYM | 1e−402 | 3 | 548 |
| HeLaS3 | | | | |
| | GCCCTCACATCC | 1.00E−240 | NA | 529 |
| | TGGCTGGCTAGG | 1.00E−227 | 1 | 549 |
| | CCCTACGTTCTC | 1.00E−226 | 1 | 534 |
| | GACTCCAGACAC | 1.00E−218 | 1 | 525 |
| | TGTCTGGAGTCT | 1.00E−137 | 1 | 550 |
| | CCAGCCAGCTCM | 1.00E−120 | 1 | 551 |
| | CCAAGACTCCAG | 1.00E−120 | 1 | 552 |
| | GGGGTGACAGAT | 1.00E−111 | 1 | 553 |
| | TACCCTACGTTC | 1.00E−106 | 1 | 554 |
| | TGTCACCCCATT | 1.00E−105 | 1 | 535 |
| | GCCAGATCAGCC | 1.00E−98 | 2 | 555 |
| | GACTACCCTACG | 1.00E−78 | 1 | 556 |
| | CACATGGAGCSS | 1.00E−68 | 2 | 557 |
| | GCTCTCAAGGTC | 1.00E−67 | 1 | 558 |
| | GACGCACATGGA | 1.00E−66 | 1 | 559 |
| | CATGTGCGTCCC | 1.00E−65 | 1 | 560 |
| | CTACGTTTCTCC | 1.00E−64 | NA | 561 |
| | AGGGTAGTCAAG | 1.00E−56 | 1 | 562 |
| | GSCGCCATCTTG | 1.00E−45 | NA | 563 |
| | CAAGGTCCATTG | 1.00E−33 | 1 | 564 |
| | TCGCCAGGGTTG | 1.00E−33 | 1 | 565 |
| | GGTCGTCCTCTT | 1.00E−32 | 2 | 566 |
| | GGAAGGGGACAC | 1.00E−18 | 1 | 567 |
| | ACGCAATTACTC | 1.00E−18 | 1 | 568 |
| SNHG1. | GGCCTGGATCAT | 1.00E−75 | 18 | 569 |
| HCT116 | | | | |
| | GAGAGCTCTGTG | 1.00E−50 | 29 | 570 |
| | CCTGGATCATGT | 1.00E−50 | 8 | 571 |
| | GTGGAGTTATGG | 1.00E−41 | 6 | 572 |
| | CGCTGGCTTTGC | 1.00E−35 | 22 | 573 |
| | GCTCTTGTGGSC | 1.00E−35 | 5 | 574 |
| | TTCCCATAACTC | 1.00E−33 | 8 | 575 |
| | ATACAGCCACCG | 1.00E−30 | 14 | 576 |
| | GCAGACACAGAT | 1.00E−30 | 8 | 577 |
| | AGAGCAGCTTGT | 1.00E−26 | 7 | 578 |
| | AACTCAGGCACT | 1.00E−25 | 13 | 579 |
| | AGCCCACAGAGC | 1.00E−23 | 9 | 580 |
| | TTGGGAAGTTCA | 1.00E−23 | 27 | 581 |
| | ACTGCTGTTTCA | 1.00E−19 | 12 | 582 |
| | CTACCTACATGG | 1.00E−16 | 12 | 583 |
| | GCTAATGATAGC | 1.00E−13 | NA | 584 |
| | TGCRARCCAGCC | 1.00E−09 | 11 | 585 |
| | GGGGACAGCCAC | 1.00E−09 | 6 | 586 |
| | KACCTYCCCCAA | 1.00E−07 | NA | 587 |
| | GVTCCTGGRTCS | 1.00E−07 | 8 | 588 |
| | CTGGTCATTGGT | 1.00E−06 | 4 | 589 |
| | GCTGGTCTGAGT | 1.00E−05 | 2 | 590 |
| | TATCAGAGGTCA | 1.00E−05 | 4 | 591 |
| | GAGATATGGGCC | 1.00E−04 | 8 | 592 |
| | CCTATCTACGCC | 1.00E−04 | NA | 593 |
| MALAT1. | GGTTTGCCGCWG | 1.00E−09 | NA | 594 |
| MCF7 | | | | |
| | CTCAGCTGCCAC | 1.00E−05 | 22 | 595 |
| | GGAGCTCACGGG | 1.00E−05 | 2 | 596 |
| | ATATTCTACCGG | 1.00E−02 | NA | 597 |
| | GTCTTTACGACA | 1.00E−02 | 4 | 598 |
| | GGAATATTCTAC | 1.00E−02 | 4 | 599 |
| | TTTATGACACCG | 1.00E−02 | 5 | 600 |
| | CGGTGGAGGAAT | 1.00E−02 | 3 | 601 |
| | GAGTCTGTCCCG | 1.00E−02 | 3 | 602 |
| NEAT1- | YCYYCYCCCYYY | 1.00E−71 | 74 | 603 |
| MCF7 | | | | |
| | SCGATTGGYYGR | 1.00E−59 | 3 | 604 |
| | AAGGGGGTGGAG | 1.00E−50 | 29 | 605 |
| | GGRRGAAARRAA | 1.00E−45 | 46 | 606 |
| | TVGCCCCGCCCC | 1.00E−44 | 14 | 607 |
| | CASCAGRGGGCA | 1.00E−42 | 12 | 608 |
| | CCCTCCCCCAAC | 1.00E−19 | 28 | 609 |
| | VTGCGCATGCGC | 1.00E−19 | 2 | 610 |
| | ATTGGCAGGCGG | 1.00E−17 | 10 | 611 |
| | CGGTCACGTGAC | 1.00E−11 | 5 | 612 |
| | CACCACCTAGTG | 1.00E−11 | 8 | 613 |
| | CTACAAATCCCA | 1.00E−11 | 8 | 614 |
| | CGGAAGTGACGT | 1.00E−10 | 5 | 615 |
| | TTTGTTTGATCT | 1.00E−10 | 12 | 616 |
| | ACAGTACAAACT | 1.00E−09 | 6 | 617 |
| | AATCTCGCGAGA | 1.00E−09 | NA | 222 |
| | CCGTGACGTCAC | 1.00E−09 | 6 | 618 |
| | CCACCAGGGGTC | 1.00E−08 | 5 | 619 |
| | AGGGTTGTGGCC | 1.00E−07 | 5 | 620 |
| | CGCAACCTAACC | 1.00E−07 | 5 | 621 |
| | GCCCGAAGCTCC | 1.00E−05 | 6 | 622 |
| | CAGACGGCCTTA | 1.00E−05 | 4 | 623 |
| | CTTATTCTCACT | 1.00E−05 | 4 | 624 |
| | TAAAGAAGAAGG | 1.00E−05 | 5 | 625 |
| | TGTGTGTGTGCG | 1.00E−04 | 72 | 626 |
| TERC. | GGGGGCTGGGCA | 1e−1348 | 4 | 627 |
| HeLaS3 | | | | |
| | GGCCACCACCCC | 1e−1177 | 1 | 628 |
| | GGTGGTGGCCAT | 1e−818 | 2 | 629 |
| | GCCTGCCCAGCC | 1e−529 | 1 | 630 |
| | GRGGGCGAGGGS | 1e−439 | 4 | 631 |
| | AAAATGGCCACC | 1e−352 | 2 | 632 |
| | MGGAGGGTGGGC | 1e−325 | 2 | 633 |
| | CCACCACCCCTC | 1.00E−275 | 2 | 634 |
| | GCCACCACCCTC | 1.00E−126 | 1 | 635 |
| | GGCCCACCTCCT | 1.00E−109 | 3 | 636 |
| | GGGGGCTGGCAG | 1.00E−96 | 4 | 637 |
| | GCCTGCCCCAGC | 1.00E−80 | 3 | 638 |
| | CCGCGGCTTCCA | 1.00E−79 | 3 | 639 |
| | GCCTCGTCCTGC | 1.00E−77 | 3 | 640 |
| | STCCCCGCGCGY | 1.00E−72 | 6 | 641 |
| | CCCTCNSCCCTC | 1.00E−69 | 4 | 642 |
| | CTGAGCTGTGGG | 1.00E−58 | 1 | 643 |
| | GTCAGCCGCGGG | 1.00E−55 | 2 | 644 |
| | AGGCCTCGGCTB | 1.00E−53 | 4 | 645 |
| | ACCCAGGACTCG | 1.00E−42 | 2 | 646 |
| | AGGACCACCTCT | 1.00E−39 | NA | 647 |
| | CAGCAGCTGACA | 1.00E−38 | 2 | 648 |
| | GGCTTCKCCAGG | 1.00E−33 | 1 | 649 |
| | TCTKGGCTTTKT | 1.00E−32 | NA | 650 |
| | TCAGTTGTAGAG | 1.00E−24 | NA | 651 |
| LED.MCF7 | CCAACTGGAGGC | 1.00E−249 | 3 | 652 |
| | AGTGAATCACAC | 1.00E−97 | 3 | 653 |
| | RATMMCAACTGG | 1.00E−86 | 1 | 654 |
| | TGAATCACACAC | 1.00E−78 | 5 | 655 |
| | GACACCAGGGTT | 1.00E−71 | 7 | 656 |
| | GGCCAAAGAGGN | 1.00E−64 | 5 | 657 |
| | GGTCTGAGTTCC | 1.00E−56 | 5 | 658 |
| | GGGCTCCAGAAA | 1.00E−55 | 3 | 659 |
| | TTCAAACCCTGG | 1.00E−55 | 3 | 660 |
| | GAGCCCCAAGAA | 1.00E−54 | 6 | 661 |
| | CAAGAACAGCTC | 1.00E−48 | 3 | 662 |
| | HGTGTTTCCTGT | 1.00E−38 | 4 | 663 |
| | AGAAGACGTGAC | 1.00E−35 | 4 | 664 |
| | CCAGAAGAAATC | 1.00E−33 | 3 | 665 |
| | GGGTCACGGAAG | 1.00E−31 | 5 | 666 |
| | AACAGAGCCCCA | 1.00E−31 | 4 | 667 |
| | CAAAGAGCTTTC | 1.00E−31 | 4 | 668 |
| | GGAAGGTCTGAG | 1.00E−31 | 7 | 669 |
| | TTCCCTGTGACC | 1.00E−30 | 6 | 670 |
| | GATCTTCCCTGT | 1.00E−29 | 6 | 671 |
| | AGCTTCATTCAG | 1.00E−27 | 1 | 672 |
| | NAGAGAGCTGTH | 1.00E−26 | 3 | 673 |
| | ACTGAGACTCCT | 1.00E−26 | 3 | 674 |
| | CGCCTAGAAAAC | 1.00E−25 | 1 | 675 |
| | GGTCAAGTCGGT | 1.00E−24 | 3 | 676 |
| SRA. | GCCCCCTAGTGG | 1.00E−80 | NA | 677 |
| NTERA2 | | | | |
| | TTGTTATGCAAA | 1.00E−21 | 1 | 678 |
| | CAAATTACTGCA | 1.00E−16 | 1 | 679 |
| | TTAAAGTGGGCT | 1.00E−11 | 1 | 680 |
| | AGGGAGGGGATG | 1.00E−11 | 2 | 681 |
| | GAGCCTAATAAA | 1.00E−11 | NA | 682 |
| | AGGTTATCTGGT | 1.00E−10 | 1 | 683 |
| | GTTTTCTTTGTG | 1.00E−10 | 4 | 684 |
| | CCAAGATTAATT | 1.00E−09 | 4 | 685 |
| | GAAAAAACCGTT | 1.00E−09 | NA | 686 |
| | CCACSACTAAGC | 1.00E−09 | 3 | 687 |
| | WACYAAATGCGT | 1.00E−09 | NA | 688 |
| | AACATGTCCCTG | 1.00E−08 | NA | 689 |
| | AAATTATTTTAG | 1.00E−07 | NA | 690 |
| | BGCATCTAAGCC | 1.00E−07 | NA | 691 |
| | CTAATGCAGAGA | 1.00E−07 | 2 | 692 |
| | TTGCCTGGAAGG | 1.00E−06 | NA | 693 |
| | ACCCATCCGCCC | 1.00E−06 | 4 | 694 |
| | AGAGTAGACGGT | 1.00E−05 | 1 | 695 |
| | AAGGGTCCAGCC | 1.00E−05 | 7 | 696 |
| | CCACTTGVGATT | 1.00E−05 | 3 | 697 |
| | CAGCCTGTGTAA | 1.00E−05 | 2 | 698 |
| | TTCTAATTATCG | 1.00E−04 | NA | 699 |
| | ACCGACACGGGG | 1.00E−04 | NA | 700 |
| | CGGCGGGARTCT | 1.00E−04 | 5 | 701 |
| DINO. | ATTGCAGAGAGG | 1.00E−116 | untreated | 702 |
| U2OS | | | | |
| | GCAGAGAGGTGC | 1.00E−80 | | 703 |
| | CCCTACACTCAC | 1.00E−60 | | 704 |
| | GAGAATGAGTTG | 1.00E−56 | | 705 |
| | HGGAAATTGCAG | 1.00E−54 | | 706 |
| | VACMCTCACCTG | 1.00E−48 | | 707 |
| | AGAAATCCCTGT | 1.00E−40 | | 708 |
| | GGAGTATTCAGG | 1.00E−30 | | 709 |
| | AACCACAGGGAT | 1.00E−25 | | 710 |
| | TTGGAGAATGAG | 1.00E−22 | | 711 |
| | CACATTTCCCCA | 1.00E−18 | | 712 |
| | TACACCCTACAC | 1.00E−17 | | 713 |
| | GAGATGAGTTGG | 1.00E−17 | | 714 |
| | TCCCTCACTAGG | 1.00E−16 | | 715 |
| | GAAAAACAWAGA | 1.00E−11 | | 716 |
| | CCTGCACTBWCA | 1.00E−11 | | 717 |
| | TCRCYSGGGCAC | 1.00E−11 | | 718 |
| | GCCCTCACGTGG | 1.00E−09 | | 719 |
| | ACCCCTATGAAA | 1.00E−06 | | 720 |
| | ACACCCACACGA | 1.00E−05 | | 721 |
| | TAGGAGGGTGAG | 1.00E−05 | | 722 |
| | ACCCTACCTCCG | 1.00E−04 | | 723 |
| | CCTGACGTCCTC | 1.00E−04 | | 724 |
| | CGTAGTAGGTGA | 1.00E−04 | | 725 |
| | AGACTGTACATT | 1.00E−02 | | 726 |

“NA” means this motif is without any motif instance in the lncRNA primary sequence.
“Untreated” means this lncRNA did not perform motif scanning.
#, SEQ ID NO:

### REFERENCES

[0312] 1. Gaj, T., Gersbach, C. A. & Barbas, C. F., 3rd. ZFN, TALEN, and CRISPR/Cas-based methods for genome engineering. Trends Biotechnol. 31, 397-405 (2013).
[0313] 2. Anzalone, A. V. et al. Search-and-replace genome editing without double-strand breaks or donor DNA. Nature 576, 149-157 (2019).
[0314] 3. Strecker, J. et al. RNA-guided DNA insertion with CRISPR-associated transposases. Science 365, 48-53 (2019).
[0315] 4. Rees, H. A. & Liu, D. R. Base editing: precision chemistry on the genome and transcriptome of living cells. Nat. Rev. Genet. 19, 770-788 (2018).
[0316] 5. Pickar-Oliver, A. & Gersbach, C. A. The next generation of CRISPR-Cas technologies and applications. Nat. Rev. Mol. Cell Biol. 20, 490-507 (2019).
[0317] 6. Thakore, P. I., Black, J. B., Hilton, I. B. & Gersbach, C. A. Editing the epigenome: technologies for programmable transcription and epigenetic modulation. Nat. Methods 13, 127-137 (2016).
[0318] 7. Wang, H., La Russa, M. & Qi, L. S. CRISPR/Cas9 in Genome Editing and Beyond. Annu. Rev. Biochem. 85, 227-264 (2016).
[0319] 8. Jolma, A. et al. Multiplexed massively parallel SELEX for characterization of human transcription factor binding specificities. Genome Res. 20, 861-873 (2010).
[0320] 9. Valouev, A. et al. Genome-wide analysis of transcription factor binding sites based on ChIP-Seq data. Nat. Methods 5, 829-834 (2008).
[0321] 10. Bulyk, M. L. Computational prediction of transcription-factor binding site locations.

[0322] Genome Biol. 5, 201 (2003).
[0323] 11. Blanchette, M. et al. Genome-wide computational prediction of transcriptional regulatory modules reveals new insights into human gene expression. Genome Res. 16, 656-668 (2006).
[0324] 12. Zhao, W. et al. CRISPR-Cas9-mediated functional dissection of 3′-UTRs. Nucleic Acids Res. 45, 10800-10810 (2017).
[0325] 13. Xue, M., Zhuo, Y. & Shan, B. MicroRNAs, Long Noncoding RNAs, and Their Functions in Human Disease. Methods Mol. Biol. 1617, 1-25 (2017).
[0326] 14. Li, J., Liang, Q., Song, W. & Marchisio, M. A. Nucleotides upstream of the Kozak sequence strongly influence gene expression in the yeast. J. Biol. Eng. 11, 25 (2017).
[0327] 15. Pinello, L., Farouni, R. & Yuan, G.-C. Haystack: systematic analysis of the variation of epigenetic states and cell-type specific regulatory elements. Bioinformatics 34, 1930-1933 (2018).
[0328] 16. Jolma, A. et al. DNA-dependent formation of transcription factor pairs alters their binding specificity. Nature 527, 384-388 (2015).
[0329] 17. Wang, C., Zhang, M. Q. & Zhang, Z. Computational identification of active enhancers in model organisms. Genomics Proteomics Bioinformatics 11, 142-150 (2013).
[0330] 18. Yang, J. & Corces, V. G. Chromatin insulators: a role in nuclear organization and gene expression. Adv. Cancer Res. 110, 43-76 (2011).
[0331] 19. Doni Jayavelu, N., Jajodia, A., Mishra, A. & Hawkins, R. D. Candidate silencer elements for the human and mouse genomes. Nat. Commun. 11, 1061 (2020).
[0332] 20. Smale, S. T. & Kadonaga, J. T. The RNA polymerase II core promoter. Annu. Rev.

[0333] Biochem. 72, 449-479 (2003).
[0334] 21. Shen, M. W. et al. Predictable and precise template-free CRISPR editing of pathogenic variants. Nature 563, 646-651 (2018).
[0335] 22. Chen, W. et al. Massively parallel profiling and predictive modeling of the outcomes of CRISPR/Cas9-mediated double-strand break repair. Nucleic Acids Res. 47, 7989-8003 (2019).
[0336] 23. Nambiar, T. S. et al. Stimulation of CRISPR-mediated homology-directed repair by an engineered RAD18 variant. Nat. Commun. 10, 3395 (2019).
[0337] 24. Komor, A. C., Kim, Y. B., Packer, M. S., Zuris, J. A. & Liu, D. R. Programmable editing of a target base in genomic DNA without double-stranded DNA cleavage. Nature 533, 420-424 (2016).
[0338] 25. Gaudelli, N. M. et al. Programmable base editing of AT to GC in genomic DNA without DNA cleavage. Nature 551, 464-471 (2017).
[0339] 26. Maresca, M., Lin, V. G., Guo, N. & Yang, Y. Obligate ligation-gated recombination (ObLiGaRe): custom-designed nuclease-mediated targeted integration through nonhomologous end joining. Genome Res. 23, 539-546 (2013).
[0340] 27. Suzuki, K. et al. In vivo genome editing via CRISPR/Cas9 mediated homology-independent targeted integration. Nature 540, 144-149 (2016).
[0341] 28. Lisse, T. S., Hewison, M. & Adams, J. S. Hormone response element binding proteins: novel regulators of vitamin D and estrogen signaling. Steroids 76, 331-339 (2011).
[0342] 29. Kribelbauer, J. F., Rastogi, C., Bussemaker, H. J. & Mann, R. S. Low-Affinity Binding Sites and the Transcription Factor Specificity Paradox in Eukaryotes. Annu. Rev. Cell Dev. Biol. 35, 357-379 (2019).
[0343] 30. Ibarra, I. L. et al. Mechanistic insights into transcription factor cooperativity and its impact on protein-phenotype interactions. Nat. Commun. 11, 124 (2020).
[0344] 31. Mohaghegh, N. et al. NextPBM: a platform to study cell-specific transcription factor binding and cooperativity. Nucleic Acids Res. 47, e31 (2019).
[0345] 32. Farley, E. K. et al. Suboptimization of developmental enhancers. Science 350, 325-328 (2015).
[0346] 33. D'Alessio, A. C. et al. A Systematic Approach to Identify Candidate Transcription Factors that Control Cell Identity. Stem Cell Reports 5, 763-775 (2015).
[0347] 34. Jones, P. A. & Takai, D. The role of DNA methylation in mammalian epigenetics. Science 293, 1068-1070 (2001).
[0348] 35. DiNardo, D. N., Butcher, D. T., Robinson, D. P., Archer, T. K. & Rodenhiser, D. I. Functional analysis of CpG methylation in the BRCA1 promoter region. Oncogene 20, 5331-5340 (2001).
[0349] 36. Guo, Y. et al. Regulation of DNA methylation in human breast cancer. Effect on the urokinase-type plasminogen activator gene production and tumor invasion. J. Biol. Chem. 277, 41571-41579 (2002).
[0350] 37. Yu, L. et al. Global assessment of promoter methylation in a mouse model of cancer identifies ID4 as a putative tumor-suppressor gene in human leukemia. Nat. Genet. 37, 265-274 (2005).
[0351] 38. Vierstra, J., Lazar, J., Sandstrom, R. et al. Global reference mapping of human transcription factor footprints. Nature 583, 729-736 (2020).

EXEMPLARY SEQUENCES
Streptococcus pyogenes Cas9, SEQ ID NO: 372
MDKKYSIGLDIGTNSVGWAVITDEYKVPSKKFKVLGNTDRHSIKKNLIGALLFDSGETA
EATRLKRTARRRYTRRKNRICYLQEIFSNEMAKVDDSFFHRLEESFLVEEDKKHERHPI
FGNIVDEVAYHEKYPTIYHLRKKLVDSTDKADLRLIYLALAHMIKFRGHFLIEGDLNPD
NSDVDKLFIQLVQTYNQLFEENPINASGVDAKAILSARLSKSRRLENLIAQLPGEKKNG
LFGNLIALSLGLTPNFKSNFDLAEDAKLQLSKDTYDDDLDNLLAQIGDQYADLFLAAKN
LSDAILLSDILRVNTEITKAPLSASMIKRYDEHHQDLTLLKALVRQQLPEKYKEIFFDQ
SKNGYAGYIDGGASQEEFYKFIKPILEKMDGTEELLVKLNREDLLRKQRTFDNGSIPHQ
IHLGELHAILRRQEDFYPFLKDNREKIEKILTFRIPYYVGPLARGNSRFAWMTRKSEET
ITPWNFEEVVDKGASAQSFIERMTNFDKNLPNEKVLPKHSLLYEYFTVYNELTKVKYVT
EGMRKPAFLSGEQKKAIVDLLFKTNRKVTVKQLKEDYFKKIECFDSVEISGVEDRFNAS
LGTYHDLLKIIKDKDFLDNEENEDILEDIVLTLTLFEDREMIEERLKTYAHLFDDKVMK
QLKRRRYTGWGRLSRKLINGIRDKQSGKTILDFLKSDGFANRNFMQLIHDDSLTFKEDI
QKAQVSGQGDSLHEHIANLAGSPAIKKGILQTVKVVDELVKVMGRHKPENIVIEMAREN
QTTQKGQKNSRERMKRIEEGIKELGSQILKEHPVENTQLQNEKLYLYYLQNGRDMYVDQ
ELDINRLSDYDVDHIVPQSFLKDDSIDNKVLTRSDKNRGKSDNVPSEEVVKKMKNYWRQ
LLNAKLITQRKFDNLTKAERGGLSELDKAGFIKRQLVETRQITKHVAQILDSRMNTKYD
ENDKLIREVKVITLKSKLVSDFRKDFQFYKVREINNYHHAHDAYLNAVVGTALIKKYPK
LESEFVYGDYKVYDVRKMIAKSEQEIGKATAKYFFYSNIMNFFKTEITLANGEIRKRPL
IETNGETGEIVWDKGRDFATVRKVLSMPQVNIVKKTEVQTGGFSKESILPKRNSDKLIA
RKKDWDPKKYGGFDSPTVAYSVLVVAKVEKGKSKKLKSVKELLGITIMERSSFEKNPID
FLEAKGYKEVKKDLIIKLPKYSLFELENGRKRMLASAGELQKGNELALPSKYVNFLYLA
SHYEKLKGSPEDNEQKQLFVEQHKHYLDEIIEQISEFSKRVILADANLDKVLSAYNKHR
DKPIREQAENIIHLFTLTNLGAPAAFKYFDTTIDRKRYTSTKEVLDATLIHQSITGLYE
TRIDLSQLGGDGSPKKKRKVSSDYKDHDGDYKDHDIDYKDDDDK
SpRY Cas9 variant, SEQ ID NO: 373
MDKKYSIGLAIGTNSVGWAVITDEYKVPSKKFKVLGNTDRHSIKKNLIGALLFDSGETA
ERTRLKRTARRRYTRRKNRICYLQEIFSNEMAKVDDSFFHRLEESFLVEEDKKHERHPI
FGNIVDEVAYHEKYPTIYHLRKKLVDSTDKADLRLIYLALAHMIKFRGHFLIEGDLNPD
NSDVDKLFIQLVQTYNQLFEENPINASGVDAKAILSARLSKSRRLENLIAQLPGEKKNG
LFGNLIALSLGLTPNFKSNFDLAEDAKLQLSKDTYDDDLDNLLAQIGDQYADLFLAAKN
LSDAILLSDILRVNTEITKAPLSASMIKRYDEHHQDLTLLKALVRQQLPEKYKEIFFDQ
SKNGYAGYIDGGASQEEFYKFIKPILEKMDGTEELLVKLNREDLLRKQRTFDNGSIPHQ
IHLGELHAILRRQEDFYPFLKDNREKIEKILTFRIPYYVGPLARGNSRFAWMTRKSEET
ITPWNFEEVVDKGASAQSFIERMTNFDKNLPNEKVLPKHSLLYEYFTVYNELTKVKYVT
EGMRKPAFLSGEQKKAIVDLLFKTNRKVTVKQLKEDYFKKIECFDSVEISGVEDRFNAS
LGTYHDLLKIIKDKDFLDNEENEDILEDIVLTLTLFEDREMIEERLKTYAHLFDDKVMK
QLKRRRYTGWGRLSRKLINGIRDKQSGKTILDFLKSDGFANRNFMQLIHDDSLTFKEDI
QKAQVSGQGDSLHEHIANLAGSPAIKKGILQTVKVVDELVKVMGRHKPENIVIEMAREN
QTTQKGQKNSRERMKRIEEGIKELGSQILKEHPVENTQLQNEKLYLYYLQNGRDMYVDQ
ELDINRLSDYDVDHIVPQSFLKDDSIDNKVLTRSDKNRGKSDNVPSEEVVKKMKNYWRQ
LLNAKLITQRKFDNLTKAERGGLSELDKAGFIKRQLVETRQITKHVAQILDSRMNTKYD
ENDKLIREVKVITLKSKLVSDFRKDFQFYKVREINNYHHAHDAYLNAVVGTALIKKYPK
LESEFVYGDYKVYDVRKMIAKSEQEIGKATAKYFFYSNIMNFFKTEITLANGEIRKRPL
IETNGETGEIVWDKGRDFATVRKVLSMPQVNIVKKTEVQTGGFSKESIRPKRNSDKLIA
RKKDWDPKKYGGFLWPTVAYSVLVVAKVEKGKSKKLKSVKELLGITIMERSSFEKNPID
FLEAKGYKEVKKDLIIKLPKYSLFELENGRKRMLASAKQLQKGNELALPSKYVNFLYLA
SHYEKLKGSPEDNEQKQLFVEQHKHYLDEIIEQISEFSKRVILADANLDKVLSAYNKHR
DKPIREQAENIIHLFTLTRLGAPRAFKYFDTTIDPKQYRSTKEVLDATLIHQSITGLYE
TRIDLSQLGGD
SpG Cas9 variant, SEQ ID NO: 374
MDKKYSIGLAIGTNSVGWAVITDEYKVPSKKFKVLGNTDRHSIKKNLIGALLFDSGETA
EATRLKRTARRRYTRRKNRICYLQEIFSNEMAKVDDSFFHRLEESFLVEEDKKHERHPI
FGNIVDEVAYHEKYPTIYHLRKKLVDSTDKADLRLIYLALAHMIKFRGHFLIEGDLNPD
NSDVDKLFIQLVQTYNQLFEENPINASGVDAKAILSARLSKSRRLENLIAQLPGEKKNG
LFGNLIALSLGLTPNFKSNFDLAEDAKLQLSKDTYDDDLDNLLAQIGDQYADLFLAAKN
LSDAILLSDILRVNTEITKAPLSASMIKRYDEHHQDLTLLKALVRQQLPEKYKEIFFDQ
SKNGYAGYIDGGASQEEFYKFIKPILEKMDGTEELLVKLNREDLLRKQRTFDNGSIPHQ
IHLGELHAILRRQEDFYPFLKDNREKIEKILTFRIPYYVGPLARGNSRFAWMTRKSEET
ITPWNFEEVVDKGASAQSFIERMTNFDKNLPNEKVLPKHSLLYEYFTVYNELTKVKYVT
EGMRKPAFLSGEQKKAIVDLLFKTNRKVTVKQLKEDYFKKIECFDSVEISGVEDRFNAS
LGTYHDLLKIIKDKDFLDNEENEDILEDIVLTLTLFEDREMIEERLKTYAHLFDDKVMK
QLKRRRYTGWGRLSRKLINGIRDKQSGKTILDFLKSDGFANRNFMQLIHDDSLTFKEDI
QKAQVSGQGDSLHEHIANLAGSPAIKKGILQTVKVVDELVKVMGRHKPENIVIEMAREN
QTTQKGQKNSRERMKRIEEGIKELGSQILKEHPVENTQLQNEKLYLYYLQNGRDMYVDQ
ELDINRLSDYDVDHIVPQSFLKDDSIDNKVLTRSDKNRGKSDNVPSEEVVKKMKNYWRQ
LLNAKLITQRKFDNLTKAERGGLSELDKAGFIKRQLVETRQITKHVAQILDSRMNTKYD
ENDKLIREVKVITLKSKLVSDFRKDFQFYKVREINNYHHAHDAYLNAVVGTALIKKYPK
LESEFVYGDYKVYDVRKMIAKSEQEIGKATAKYFFYSNIMNFFKTEITLANGEIRKRPL
IETNGETGEIVWDKGRDFATVRKVLSMPQVNIVKKTEVQTGGFSKESILPKRNSDKLIA
RKKDWDPKKYGGFLWPTVAYSVLVVAKVEKGKSKKLKSVKELLGITIMERSSFEKNPID
FLEAKGYKEVKKDLIIKLPKYSLFELENGRKRMLASAKQLQKGNELALPSKYVNFLYLA
SHYEKLKGSPEDNEQKQLFVEQHKHYLDEIIEQISEFSKRVILADANLDKVLSAYNKHR
DKPIREQAENIIHLFTLTNLGAPAAFKYFDTTIDRKQYRSTKEVLDATLIHQSITGLYE
TRIDLSQLGGD
BE1 for Mammalian expression (rAPOBEC1-XTEN-
dCas9-NLS), SEQ ID NO: 375
MSSETGPVAVDPTLRRRIEPHEFEVFFDPRELRKETCLLYEINWGGRHSIWRHTSQNTN
KHVEVNFIEKFTTERYFCPNTRCSITWFLSWSPCGECSRAITEFLSRYPHVTLFIYIAR
LYHHADPRNRQGLRDLISSGVTIQIMTEQESGYCWRNFVNYSPSNEAHWPRYPHLWVRL
YVLELYCIILGLPPCLNILRRKQPQLTFFTIALQSCHYQRLPPHILWATGLKSGSETPG
TSESATPESDKKYSIGLAIGTNSVGWAVITDEYKVPSKKFKVLGNTDRHSIKKNLIGAL
LFDSGETAEATRLKRTARRRYTRRKNRICYLQEIFSNEMAKVDDSFFHRLEESFLVEED
KKHERHPIFGNIVDEVAYHEKYPTIYHLRKKLVDSTDKADLRLIYLALAHMIKFRGHFL
IEGDLNPDNSDVDKLFIQLVQTYNQLFEENPINASGVDAKAILSARLSKSRRLENLIAQ
LPGEKKNGLFGNLIALSLGLTPNFKSNFDLAEDAKLQLSKDTYDDDLDNLLAQIGDQYA
DLFLAAKNLSDAILLSDILRVNTEITKAPLSASMIKRYDEHHQDLTLLKALVRQQLPEK
YKEIFFDQSKNGYAGYIDGGASQEEFYKFIKPILEKMDGTEELLVKLNREDLLRKQRTF
DNGSIPHQIHLGELHAILRRQEDFYPFLKDNREKIEKILTFRIPYYVGPLARGNSRFAW
MTRKSEETITPWNFEEVVDKGASAQSFIERMTNFDKNLPNEKVLPKHSLLYEYFTVYNE
LTKVKYVTEGMRKPAFLSGEQKKAIVDLLFKTNRKVTVKQLKEDYFKKIECFDSVEISG
VEDRFNASLGTYHDLLKIIKDKDFLDNEENEDILEDIVLTLTLFEDREMIEERLKTYAH
LFDDKVMKQLKRRRYTGWGRLSRKLINGIRDKQSGKTILDFLKSDGFANRNFMQLIHDD
SLTFKEDIQKAQVSGQGDSLHEHIANLAGSPAIKKGILQTVKVVDELVKVMGRHKPENI
VIEMARENQTTQKGQKNSRERMKRIEEGIKELGSQILKEHPVENTQLQNEKLYLYYLQN
GRDMYVDQELDINRLSDYDVDAIVPQSFLKDDSIDNKVLTRSDKNRGKSDNVPSEEVVK
KMKNYWRQLLNAKLITQRKFDNLTKAERGGLSELDKAGFIKRQLVETRQITKHVAQILD
SRMNTKYDENDKLIREVKVITLKSKLVSDFRKDFQFYKVREINNYHHAHDAYLNAVVGT
ALIKKYPKLESEFVYGDYKVYDVRKMIAKSEQEIGKATAKYFFYSNIMNFFKTEITLAN
GEIRKRPLIETNGETGEIVWDKGRDFATVRKVLSMPQVNIVKKTEVQTGGFSKESILPK
RNSDKLIARKKDWDPKKYGGFDSPTVAYSVLVVAKVEKGKSKKLKSVKELLGITIMERS
SFEKNPIDFLEAKGYKEVKKDLIIKLPKYSLFELENGRKRMLASAGELQKGNELALPSK
YVNFLYLASHYEKLKGSPEDNEQKQLFVEQHKHYLDEIIEQISEFSKRVILADANLDKV
LSAYNKHRDKPIREQAENIIHLFTLTNLGAPAAFKYFDTTIDRKRYTSTKEVLDATLIH
QSITGLYETRIDLSQLGGDSGGSPKKKRKV
BE2 (rAPOBEC1-XTEN-dCas9-UGI-NLS) SEQ ID NO: 376
MSSETGPVAVDPTLRRRIEPHEFEVFFDPRELRKETCLLYEINWGGRHSIWRHTSQNTN
KHVEVNFIEKFTTERYFCPNTRCSITWFLSWSPCGECSRAITEFLSRYPHVTLFIYIAR
LYHHADPRNRQGLRDLISSGVTIQIMTEQESGYCWRNFVNYSPSNEAHWPRYPHLWVRL
YVLELYCIILGLPPCLNILRRKQPQLTFFTIALQSCHYQRLPPHILWATGLKSGSETPG
TSESATPESDKKYSIGLAIGTNSVGWAVITDEYKVPSKKFKVLGNTDRHSIKKNLIGAL
LFDSGETAEATRLKRTARRRYTRRKNRICYLQEIFSNEMAKVDDSFFHRLEESFLVEED
KKHERHPIFGNIVDEVAYHEKYPTIYHLRKKLVDSTDKADLRLIYLALAHMIKFRGHFL
IEGDLNPDNSDVDKLFIQLVQTYNQLFEENPINASGVDAKAILSARLSKSRRLENLIAQ
LPGEKKNGLFGNLIALSLGLTPNFKSNFDLAEDAKLQLSKDTYDDDLDNLLAQIGDQYA
DLFLAAKNLSDAILLSDILRVNTEITKAPLSASMIKRYDEHHQDLTLLKALVRQQLPEK
YKEIFFDQSKNGYAGYIDGGASQEEFYKFIKPILEKMDGTEELLVKLNREDLLRKQRTF
DNGSIPHQIHLGELHAILRRQEDFYPFLKDNREKIEKILTFRIPYYVGPLARGNSRFAW
MTRKSEETITPWNFEEVVDKGASAQSFIERMTNFDKNLPNEKVLPKHSLLYEYFTVYNE
LTKVKYVTEGMRKPAFLSGEQKKAIVDLLFKTNRKVTVKQLKEDYFKKIECFDSVEISG
VEDRFNASLGTYHDLLKIIKDKDFLDNEENEDILEDIVLTLTLFEDREMIEERLKTYAH
LFDDKVMKQLKRRRYTGWGRLSRKLINGIRDKQSGKTILDFLKSDGFANRNFMQLIHDD
SLTFKEDIQKAQVSGQGDSLHEHIANLAGSPAIKKGILQTVKVVDELVKVMGRHKPENI
VIEMARENQTTQKGQKNSRERMKRIEEGIKELGSQILKEHPVENTQLQNEKLYLYYLQN
GRDMYVDQELDINRLSDYDVDAIVPQSFLKDDSIDNKVLTRSDKNRGKSDNVPSEEVVK
KMKNYWRQLLNAKLITQRKFDNLTKAERGGLSELDKAGFIKRQLVETRQITKHVAQILD
SRMNTKYDENDKLIREVKVITLKSKLVSDFRKDFQFYKVREINNYHHAHDAYLNAVVGT
ALIKKYPKLESEFVYGDYKVYDVRKMIAKSEQEIGKATAKYFFYSNIMNFFKTEITLAN
GEIRKRPLIETNGETGEIVWDKGRDFATVRKVLSMPQVNIVKKTEVQTGGFSKESILPK
RNSDKLIARKKDWDPKKYGGFDSPTVAYSVLVVAKVEKGKSKKLKSVKELLGITIMERS
SFEKNPIDFLEAKGYKEVKKDLIIKLPKYSLFELENGRKRMLASAGELQKGNELALPSK
YVNFLYLASHYEKLKGSPEDNEQKQLFVEQHKHYLDEIIEQISEFSKRVILADANLDKV
LSAYNKHRDKPIREQAENIIHLFTLTNLGAPAAFKYFDTTIDRKRYTSTKEVLDATLIH
QSITGLYETRIDLSQLGGDSGGSTNLSDIIEKETGKQLVIQESILMLPEEVEEVIGNKP
ESDILVHTAYDESTDENVMLLTSDAPEYKPWALVIQDSNGENKIKMLSGGSPKKKRKV
BE3 (rAPOBEC1-XTEN-Cas9n-UGI-NLS) SEQ ID NO: 377
MSSETGPVAVDPTLRRRIEPHEFEVFFDPRELRKETCLLYEINWGGRHSIWRHTSQNTN
KHVEVNFIEKFTTERYFCPNTRCSITWFLSWSPCGECSRAITEFLSRYPHVTLFIYIAR
LYHHADPRNRQGLRDLISSGVTIQIMTEQESGYCWRNFVNYSPSNEAHWPRYPHLWVRL
YVLELYCIILGLPPCLNILRRKQPQLTFFTIALQSCHYQRLPPHILWATGLKSGSETPG
TSESATPESDKKYSIGLAIGTNSVGWAVITDEYKVPSKKFKVLGNTDRHSIKKNLIGAL
LFDSGETAEATRLKRTARRRYTRRKNRICYLQEIFSNEMAKVDDSFFHRLEESFLVEED
KKHERHPIFGNIVDEVAYHEKYPTIYHLRKKLVDSTDKADLRLIYLALAHMIKFRGHFL
IEGDLNPDNSDVDKLFIQLVQTYNQLFEENPINASGVDAKAILSARLSKSRRLENLIAQ
LPGEKKNGLFGNLIALSLGLTPNFKSNFDLAEDAKLQLSKDTYDDDLDNLLAQIGDQYA
DLFLAAKNLSDAILLSDILRVNTEITKAPLSASMIKRYDEHHQDLTLLKALVRQQLPEK
YKEIFFDQSKNGYAGYIDGGASQEEFYKFIKPILEKMDGTEELLVKLNREDLLRKQRTF
DNGSIPHQIHLGELHAILRRQEDFYPFLKDNREKIEKILTFRIPYYVGPLARGNSRFAW
MTRKSEETITPWNFEEVVDKGASAQSFIERMTNFDKNLPNEKVLPKHSLLYEYFTVYNE
LTKVKYVTEGMRKPAFLSGEQKKAIVDLLFKTNRKVTVKQLKEDYFKKIECFDSVEISG
VEDRFNASLGTYHDLLKIIKDKDFLDNEENEDILEDIVLTLTLFEDREMIEERLKTYAH
LFDDKVMKQLKRRRYTGWGRLSRKLINGIRDKQSGKTILDFLKSDGFANRNFMQLIHDD
SLTFKEDIQKAQVSGQGDSLHEHIANLAGSPAIKKGILQTVKVVDELVKVMGRHKPENI
VIEMARENQTTQKGQKNSRERMKRIEEGIKELGSQILKEHPVENTQLQNEKLYLYYLQN
GRDMYVDQELDINRLSDYDVDHIVPQSFLKDDSIDNKVLTRSDKNRGKSDNVPSEEVVK
KMKNYWRQLLNAKLITQRKFDNLTKAERGGLSELDKAGFIKRQLVETRQITKHVAQILD
SRMNTKYDENDKLIREVKVITLKSKLVSDFRKDFQFYKVREINNYHHAHDAYLNAVVGT
ALIKKYPKLESEFVYGDYKVYDVRKMIAKSEQEIGKATAKYFFYSNIMNFFKTEITLAN
GEIRKRPLIETNGETGEIVWDKGRDFATVRKVLSMPQVNIVKKTEVQTGGFSKESILPK
RNSDKLIARKKDWDPKKYGGFDSPTVAYSVLVVAKVEKGKSKKLKSVKELLGITIMERS
SFEKNPIDFLEAKGYKEVKKDLIIKLPKYSLFELENGRKRMLASAGELQKGNELALPSK
YVNFLYLASHYEKLKGSPEDNEQKQLFVEQHKHYLDEIIEQISEFSKRVILADANLDKV
LSAYNKHRDKPIREQAENIIHLFTLTNLGAPAAFKYFDTTIDRKRYTSTKEVLDATLIH
QSITGLYETRIDLSQLGGDSGGSTNLSDIIEKETGKQLVIQESILMLPEEVEEVIGNKP
ESDILVHTAYDESTDENVMLLTSDAPEYKPWALVIQDSNGENKIKMLSGGSPKKKRKV
CDA1-BE3: SEQ ID NO: 378
MTDAEYVRIHEKLDIYTFKKQFFNNKKSVSHRCYVLFELKRRGERRACFWGYAVNKPQS
GTERGIHAEIFSIRKVEEYLRDNPGQFTINWYSSWSPCADCAEKILEWYNQELRGNGHT
LKIWACKLYYEKNARNQIGLWNLRDNGVGLNVMVSEHYQCCRKIFIQSSHNQLNENRWL
EKTLKRAEKRRSELSIMIQVKILHTTKSPAVSGSETPGTSESATPESDKKYSIGLAIGT
NSVGWAVITDEYKVPSKKFKVLGNTDRHSIKKNLIGALLFDSGETAEATRLKRTARRRY
TRRKNRICYLQEIFSNEMAKVDDSFFHRLEESFLVEEDKKHERHPIFGNIVDEVAYHEK
YPTIYHLRKKLVDSTDKADLRLIYLALAHMIKFRGHFLIEGDLNPDNSDVDKLFIQLVQ
TYNQLFEENPINASGVDAKAILSARLSKSRRLENLIAQLPGEKKNGLFGNLIALSLGLT
PNFKSNFDLAEDAKLQLSKDTYDDDLDNLLAQIGDQYADLFLAAKNLSDAILLSDILRV
NTEITKAPLSASMIKRYDEHHQDLTLLKALVRQQLPEKYKEIFFDQSKNGYAGYIDGGA
SQEEFYKFIKPILEKMDGTEELLVKLNREDLLRKQRTFDNGSIPHQIHLGELHAILRRQ
EDFYPFLKDNREKIEKILTFRIPYYVGPLARGNSRFAWMTRKSEETITPWNFEEVVDKG
ASAQSFIERMTNFDKNLPNEKVLPKHSLLYEYFTVYNELTKVKYVTEGMRKPAFLSGEQ
KKAIVDLLFKTNRKVTVKQLKEDYFKKIECFDSVEISGVEDRFNASLGTYHDLLKIIKD
KDFLDNEENEDILEDIVLTLTLFEDREMIEERLKTYAHLFDDKVMKQLKRRRYTGWGRL
SRKLINGIRDKQSGKTILDFLKSDGFANRNFMQLIHDDSLTFKEDIQKAQVSGQGDSLH
EHIANLAGSPAIKKGILQTVKVVDELVKVMGRHKPENIVIEMARENQTTQKGQKNSRER
MKRIEEGIKELGSQILKEHPVENTQLQNEKLYLYYLQNGRDMYVDQELDINRLSDYDVD
HIVPQSFLKDDSIDNKVLTRSDKNRGKSDNVPSEEVVKKMKNYWRQLLNAKLITQRKFD
NLTKAERGGLSELDKAGFIKRQLVETRQITKHVAQILDSRMNTKYDENDKLIREVKVIT
LKSKLVSDFRKDFQFYKVREINNYHHAHDAYLNAVVGTALIKKYPKLESEFVYGDYKVY
DVRKMIAKSEQEIGKATAKYFFYSNIMNFFKTEITLANGEIRKRPLIETNGETGEIVWD
KGRDFATVRKVLSMPQVNIVKKTEVQTGGFSKESILPKRNSDKLIARKKDWDPKKYGGF
DSPTVAYSVLVVAKVEKGKSKKLKSVKELLGITIMERSSFEKNPIDFLEAKGYKEVKKD
LIIKLPKYSLFELENGRKRMLASAGELQKGNELALPSKYVNFLYLASHYEKLKGSPEDN
EQKQLFVEQHKHYLDEIIEQISEFSKRVILADANLDKVLSAYNKHRDKPIREQAENIIH
LFTLTNLGAPAAFKYFDTTIDRKRYTSTKEVLDATLIHQSITGLYETRIDLSQLGGDSG
GSTNLSDIIEKETGKQLVIQESILMLPEEVEEVIGNKPESDILVHTAYDESTDENVMLL
TSDAPEYKPWALVIQDSNGENKIKMLSGGSPKKKRKV
AID-BE3: SEQ ID NO: 379
MDSLLMNRRKFLYQFKNVRWAKGRRETYLCYVVKRRDSATSFSLDFGYLRNKNGCHVEL
LFLRYISDWDLDPGRCYRVTWFTSWSPCYDCARHVADFLRGNPNLSLRIFTARLYFCED
RKAEPEGLRRLHRAGVQIAIMTFKDYFYCWNTFVENHERTFKAWEGLHENSVRLSRQLR
RILLPLYEVDDLRDAFRTLGLSGSETPGTSESATPESDKKYSIGLAIGTNSVGWAVITD
EYKVPSKKFKVLGNTDRHSIKKNLIGALLFDSGETAEATRLKRTARRRYTRRKNRICYL
QEIFSNEMAKVDDSFFHRLEESFLVEEDKKHERHPIFGNIVDEVAYHEKYPTIYHLRKK
LVDSTDKADLRLIYLALAHMIKFRGHFLIEGDLNPDNSDVDKLFIQLVQTYNQLFEENP
INASGVDAKAILSARLSKSRRLENLIAQLPGEKKNGLFGNLIALSLGLTPNFKSNFDLA
EDAKLQLSKDTYDDDLDNLLAQIGDQYADLFLAAKNLSDAILLSDILRVNTEITKAPLS
ASMIKRYDEHHQDLTLLKALVRQQLPEKYKEIFFDQSKNGYAGYIDGGASQEEFYKFIK
PILEKMDGTEELLVKLNREDLLRKQRTFDNGSIPHQIHLGELHAILRRQEDFYPFLKDN
REKIEKILTFRIPYYVGPLARGNSRFAWMTRKSEETITPWNFEEVVDKGASAQSFIERM
TNFDKNLPNEKVLPKHSLLYEYFTVYNELTKVKYVTEGMRKPAFLSGEQKKAIVDLLFK
TNRKVTVKQLKEDYFKKIECFDSVEISGVEDRFNASLGTYHDLLKIIKDKDFLDNEENE
DILEDIVLTLTLFEDREMIEERLKTYAHLFDDKVMKQLKRRRYTGWGRLSRKLINGIRD
KQSGKTILDFLKSDGFANRNFMQLIHDDSLTFKEDIQKAQVSGQGDSLHEHIANLAGSP
AIKKGILQTVKVVDELVKVMGRHKPENIVIEMARENQTTQKGQKNSRERMKRIEEGIKE
LGSQILKEHPVENTQLQNEKLYLYYLQNGRDMYVDQELDINRLSDYDVDHIVPQSFLKD
DSIDNKVLTRSDKNRGKSDNVPSEEVVKKMKNYWRQLLNAKLITQRKFDNLTKAERGGL
SELDKAGFIKRQLVETRQITKHVAQILDSRMNTKYDENDKLIREVKVITLKSKLVSDFR
KDFQFYKVREINNYHHAHDAYLNAVVGTALIKKYPKLESEFVYGDYKVYDVRKMIAKSE
QEIGKATAKYFFYSNIMNFFKTEITLANGEIRKRPLIETNGETGEIVWDKGRDFATVRK
VLSMPQVNIVKKTEVQTGGFSKESILPKRNSDKLIARKKDWDPKKYGGFDSPTVAYSVL
VVAKVEKGKSKKLKSVKELLGITIMERSSFEKNPIDFLEAKGYKEVKKDLIIKLPKYSL
FELENGRKRMLASAGELQKGNELALPSKYVNFLYLASHYEKLKGSPEDNEQKQLFVEQH
KHYLDEIIEQISEFSKRVILADANLDKVLSAYNKHRDKPIREQAENIIHLFTLTNLGAP
AAFKYFDTTIDRKRYTSTKEVLDATLIHQSITGLYETRIDLSQLGGDSGGSTNLSDIIE
KETGKQLVIQESILMLPEEVEEVIGNKPESDILVHTAYDESTDENVMLLTSDAPEYKPW
ALVIQDSNGENKIKMLSGGSPKKKRKV
BE3-Gam: SEQ ID NO: 380
MAKPAKRIKSAAAAYVPQNRDAVITDIKRIGDLQREASRLETEMNDAIAEITEKFAARI
APIKTDIETLSKGVQGWCEANRDELTNGGKVKTANLVTGDVSWRVRPPSVSIRGMDAVM
ETLERLGLQRFIRTKQEINKEAILLEPKAVAGVAGITVKSGIEDFSIIPFEQEAGISGS
ETPGTSESATPESSSETGPVAVDPTLRRRIEPHEFEVFFDPRELRKETCLLYEINWGGR
HSIWRHTSQNTNKHVEVNFIEKFTTERYFCPNTRCSITWFLSWSPCGECSRAITEFLSR
YPHVTLFIYIARLYHHADPRNRQGLRDLISSGVTIQIMTEQESGYCWRNFVNYSPSNEA
HWPRYPHLWVRLYVLELYCIILGLPPCLNILRRKQPQLTFFTIALQSCHYQRLPPHILW
ATGLKSGSETPGTSESATPESDKKYSIGLAIGTNSVGWAVITDEYKVPSKKFKVLGNTD
RHSIKKNLIGALLFDSGETAEATRLKRTARRRYTRRKNRICYLQEIFSNEMAKVDDSFF
HRLEESFLVEEDKKHERHPIFGNIVDEVAYHEKYPTIYHLRKKLVDSTDKADLRLIYLA
LAHMIKFRGHFLIEGDLNPDNSDVDKLFIQLVQTYNQLFEENPINASGVDAKAILSARL
SKSRRLENLIAQLPGEKKNGLFGNLIALSLGLTPNFKSNFDLAEDAKLQLSKDTYDDDL
DNLLAQIGDQYADLFLAAKNLSDAILLSDILRVNTEITKAPLSASMIKRYDEHHQDLTL
LKALVRQQLPEKYKEIFFDQSKNGYAGYIDGGASQEEFYKFIKPILEKMDGTEELLVKL
NREDLLRKQRTFDNGSIPHQIHLGELHAILRRQEDFYPFLKDNREKIEKILTFRIPYYV
GPLARGNSRFAWMTRKSEETITPWNFEEVVDKGASAQSFIERMTNFDKNLPNEKVLPKH
SLLYEYFTVYNELTKVKYVTEGMRKPAFLSGEQKKAIVDLLFKTNRKVTVKQLKEDYFK
KIECFDSVEISGVEDRFNASLGTYHDLLKIIKDKDFLDNEENEDILEDIVLTLTLFEDR
EMIEERLKTYAHLFDDKVMKQLKRRRYTGWGRLSRKLINGIRDKQSGKTILDFLKSDGF
ANRNFMQLIHDDSLTFKEDIQKAQVSGQGDSLHEHIANLAGSPAIKKGILQTVKVVDEL
VKVMGRHKPENIVIEMARENQTTQKGQKNSRERMKRIEEGIKELGSQILKEHPVENTQL
QNEKLYLYYLQNGRDMYVDQELDINRLSDYDVDHIVPQSFLKDDSIDNKVLTRSDKNRG
KSDNVPSEEVVKKMKNYWRQLLNAKLITQRKFDNLTKAERGGLSELDKAGFIKRQLVET
RQITKHVAQILDSRMNTKYDENDKLIREVKVITLKSKLVSDFRKDFQFYKVREINNYHH
AHDAYLNAVVGTALIKKYPKLESEFVYGDYKVYDVRKMIAKSEQEIGKATAKYFFYSNI
MNFFKTEITLANGEIRKRPLIETNGETGEIVWDKGRDFATVRKVLSMPQVNIVKKTEVQ
TGGFSKESILPKRNSDKLIARKKDWDPKKYGGFDSPTVAYSVLVVAKVEKGKSKKLKSV
KELLGITIMERSSFEKNPIDFLEAKGYKEVKKDLIIKLPKYSLFELENGRKRMLASAGE
LQKGNELALPSKYVNFLYLASHYEKLKGSPEDNEQKQLFVEQHKHYLDEIIEQISEFSK
RVILADANLDKVLSAYNKHRDKPIREQAENIIHLFTLTNLGAPAAFKYFDTTIDRKRYT
STKEVLDATLIHQSITGLYETRIDLSQLGGDSGGSTNLSDIIEKETGKQLVIQESILML
PEEVEEVIGNKPESDILVHTAYDESTDENVMLLTSDAPEYKPWALVIQDSNGENKIKML
SGGSPKKKRKV
SaBE3-Gam: SEQ ID NO: 381
MAKPAKRIKSAAAAYVPQNRDAVITDIKRIGDLQREASRLETEMNDAIAEITEKFAARI
APIKTDIETLSKGVQGWCEANRDELTNGGKVKTANLVTGDVSWRVRPPSVSIRGMDAVM
ETLERLGLQRFIRTKQEINKEAILLEPKAVAGVAGITVKSGIEDFSIIPFEQEAGISGS
ETPGTSESATPESSSETGPVAVDPTLRRRIEPHEFEVFFDPRELRKETCLLYEINWGGR
HSIWRHTSQNTNKHVEVNFIEKFTTERYFCPNTRCSITWFLSWSPCGECSRAITEFLSR
YPHVTLFIYIARLYHHADPRNRQGLRDLISSGVTIQIMTEQESGYCWRNFVNYSPSNEA
HWPRYPHLWVRLYVLELYCIILGLPPCLNILRRKQPQLTFFTIALQSCHYQRLPPHILW
ATGLKSGSETPGTSESATPESGKRNYILGLAIGITSVGYGIIDYETRDVIDAGVRLFKE
ANVENNEGRRSKRGARRLKRRRRHRIQRVKKLLFDYNLLTDHSELSGINPYEARVKGLS
QKLSEEEFSAALLHLAKRRGVHNVNEVEEDTGNELSTKEQISRNSKALEEKYVAELQLE
RLKKDGEVRGSINRFKTSDYVKEAKQLLKVQKAYHQLDQSFIDTYIDLLETRRTYYEGP
GEGSPFGWKDIKEWYEMLMGHCTYFPEELRSVKYAYNADLYNALNDLNNLVITRDENEK
LEYYEKFQIIENVFKQKKKPTLKQIAKEILVNEEDIKGYRVTSTGKPEFTNLKVYHDIK
DITARKEIIENAELLDQIAKILTIYQSSEDIQEELTNLNSELTQEEIEQISNLKGYTGT
HNLSLKAINLILDELWHTNDNQIAIFNRLKLVPKKVDLSQQKEIPTTLVDDFILSPVVK
RSFIQSIKVINAIIKKYGLPNDIIIELAREKNSKDAQKMINEMQKRNRQTNERIEEIIR
TTGKENAKYLIEKIKLHDMQEGKCLYSLEAIPLEDLLNNPFNYEVDHIIPRSVSFDNSF
NNKVLVKQEENSKKGNRTPFQYLSSSDSKISYETFKKHILNLAKGKGRISKTKKEYLLE
ERDINRFSVQKDFINRNLVDTRYATRGLMNLLRSYFRVNNLDVKVKSINGGFTSFLRRK
WKFKKERNKGYKHHAEDALIIANADFIFKEWKKLDKAKKVMENQMFEEKQAESMPEIET
EQEYKEIFITPHQIKHIKDFKDYKYSHRVDKKPNRELINDTLYSTRKDDKGNTLIVNNL
NGLYDKDNDKLKKLINKSPEKLLMYHHDPQTYQKLKLIMEQYGDEKNPLYKYYEETGNY
LTKYSKKDNGPVIKKIKYYGNKLNAHLDITDDYPNSRNKVVKLSLKPYRFDVYLDNGVY
KFVTVKNLDVIKKENYYEVNSKCYEEAKKLKKISNQAEFIASFYNNDLIKINGELYRVI
GVNNDLLNRIEVNMIDITYREYLENMNDKRPPRIIKTIASKTQSIKKYSTDILGNLYEV
KSKKHPQIIKKGGSPKKKRKVSSDYKDHDGDYKDHDIDYKDDDDKSGGSTNLSDIIEKE
TGKQLVIQESILMLPEEVEEVIGNKPESDILVHTAYDESTDENVMLLTSDAPEYKPWAL
VIQDSNGENKIKMLSGGSPKKKRKV
BE4: SEQ ID NO: 382
MSSETGPVAVDPTLRRRIEPHEFEVFFDPRELRKETCLLYEINWGGRHSIWRHTSQNTN
KHVEVNFIEKFTTERYFCPNTRCSITWFLSWSPCGECSRAITEFLSRYPHVTLFIYIAR
LYHHADPRNRQGLRDLISSGVTIQIMTEQESGYCWRNFVNYSPSNEAHWPRYPHLWVRL
YVLELYCIILGLPPCLNILRRKQPQLTFFTIALQSCHYQRLPPHILWATGLKSGGSSGG
SSGSETPGTSESATPESSGGSSGGSDKKYSIGLAIGTNSVGWAVITDEYKVPSKKFKVL
GNTDRHSIKKNLIGALLFDSGETAEATRLKRTARRRYTRRKNRICYLQEIFSNEMAKVD
DSFFHRLEESFLVEEDKKHERHPIFGNIVDEVAYHEKYPTIYHLRKKLVDSTDKADLRL
IYLALAHMIKFRGHFLIEGDLNPDNSDVDKLFIQLVQTYNQLFEENPINASGVDAKAIL
SARLSKSRRLENLIAQLPGEKKNGLFGNLIALSLGLTPNFKSNFDLAEDAKLQLSKDTY
DDDLDNLLAQIGDQYADLFLAAKNLSDAILLSDILRVNTEITKAPLSASMIKRYDEHHQ
DLTLLKALVRQQLPEKYKEIFFDQSKNGYAGYIDGGASQEEFYKFIKPILEKMDGTEEL
LVKLNREDLLRKQRTFDNGSIPHQIHLGELHAILRRQEDFYPFLKDNREKIEKILTFRI
PYYVGPLARGNSRFAWMTRKSEETITPWNFEEVVDKGASAQSFIERMTNFDKNLPNEKV
LPKHSLLYEYFTVYNELTKVKYVTEGMRKPAFLSGEQKKAIVDLLFKTNRKVTVKQLKE
DYFKKIECFDSVEISGVEDRFNASLGTYHDLLKIIKDKDFLDNEENEDILEDIVLTLTL
FEDREMIEERLKTYAHLFDDKVMKQLKRRRYTGWGRLSRKLINGIRDKQSGKTILDFLK
SDGFANRNFMQLIHDDSLTFKEDIQKAQVSGQGDSLHEHIANLAGSPAIKKGILQTVKV
VDELVKVMGRHKPENIVIEMARENQTTQKGQKNSRERMKRIEEGIKELGSQILKEHPVE
NTQLQNEKLYLYYLQNGRDMYVDQELDINRLSDYDVDHIVPQSFLKDDSIDNKVLTRSD
KNRGKSDNVPSEEVVKKMKNYWRQLLNAKLITQRKFDNLTKAERGGLSELDKAGFIKRQ
LVETRQITKHVAQILDSRMNTKYDENDKLIREVKVITLKSKLVSDFRKDFQFYKVREIN
NYHHAHDAYLNAVVGTALIKKYPKLESEFVYGDYKVYDVRKMIAKSEQEIGKATAKYFF
YSNIMNFFKTEITLANGEIRKRPLIETNGETGEIVWDKGRDFATVRKVLSMPQVNIVKK
TEVQTGGFSKESILPKRNSDKLIARKKDWDPKKYGGFDSPTVAYSVLVVAKVEKGKSKK
LKSVKELLGITIMERSSFEKNPIDFLEAKGYKEVKKDLIIKLPKYSLFELENGRKRMLA
SAGELQKGNELALPSKYVNFLYLASHYEKLKGSPEDNEQKQLFVEQHKHYLDEIIEQIS
EFSKRVILADANLDKVLSAYNKHRDKPIREQAENIIHLFTLTNLGAPAAFKYFDTTIDR
KRYTSTKEVLDATLIHQSITGLYETRIDLSQLGGDSGGSGGSGGSTNLSDIIEKETGKQ
LVIQESILMLPEEVEEVIGNKPESDILVHTAYDESTDENVMLLTSDAPEYKPWALVIQD
SNGENKIKMLSGGSGGSGGSTNLSDIIEKETGKQLVIQESILMLPEEVEEVIGNKPESD
ILVHTAYDESTDENVMLLTSDAPEYKPWALVIQDSNGENKIKMLSGGSPKKKRK
BE4-Gam: SEQ ID NO: 383
MAKPAKRIKSAAAAYVPQNRDAVITDIKRIGDLQREASRLETEMNDAIAEITEKFAARI
APIKTDIETLSKGVQGWCEANRDELTNGGKVKTANLVTGDVSWRVRPPSVSIRGMDAVM
ETLERLGLQRFIRTKQEINKEAILLEPKAVAGVAGITVKSGIEDFSIIPFEQEAGISGS
ETPGTSESATPESSSETGPVAVDPTLRRRIEPHEFEVFFDPRELRKETCLLYEINWGGR
HSIWRHTSQNTNKHVEVNFIEKFTTERYFCPNTRCSITWFLSWSPCGECSRAITEFLSR
YPHVTLFIYIARLYHHADPRNRQGLRDLISSGVTIQIMTEQESGYCWRNFVNYSPSNEA
HWPRYPHLWVRLYVLELYCIILGLPPCLNILRRKQPQLTFFTIALQSCHYQRLPPHILW
ATGLKSGGSSGGSSGSETPGTSESATPESSGGSSGGSDKKYSIGLAIGTNSVGWAVITD
EYKVPSKKFKVLGNTDRHSIKKNLIGALLFDSGETAEATRLKRTARRRYTRRKNRICYL
QEIFSNEMAKVDDSFFHRLEESFLVEEDKKHERHPIFGNIVDEVAYHEKYPTIYHLRKK
LVDSTDKADLRLIYLALAHMIKFRGHFLIEGDLNPDNSDVDKLFIQLVQTYNQLFEENP
INASGVDAKAILSARLSKSRRLENLIAQLPGEKKNGLFGNLIALSLGLTPNFKSNFDLA
EDAKLQLSKDTYDDDLDNLLAQIGDQYADLFLAAKNLSDAILLSDILRVNTEITKAPLS
ASMIKRYDEHHQDLTLLKALVRQQLPEKYKEIFFDQSKNGYAGYIDGGASQEEFYKFIK
PILEKMDGTEELLVKLNREDLLRKQRTFDNGSIPHQIHLGELHAILRRQEDFYPFLKDN
REKIEKILTFRIPYYVGPLARGNSRFAWMTRKSEETITPWNFEEVVDKGASAQSFIERM
TNFDKNLPNEKVLPKHSLLYEYFTVYNELTKVKYVTEGMRKPAFLSGEQKKAIVDLLFK
TNRKVTVKQLKEDYFKKIECFDSVEISGVEDRFNASLGTYHDLLKIIKDKDFLDNEENE
DILEDIVLTLTLFEDREMIEERLKTYAHLFDDKVMKQLKRRRYTGWGRLSRKLINGIRD
KQSGKTILDFLKSDGFANRNFMQLIHDDSLTFKEDIQKAQVSGQGDSLHEHIANLAGSP
AIKKGILQTVKVVDELVKVMGRHKPENIVIEMARENQTTQKGQKNSRERMKRIEEGIKE
LGSQILKEHPVENTQLQNEKLYLYYLQNGRDMYVDQELDINRLSDYDVDHIVPQSFLKD
DSIDNKVLTRSDKNRGKSDNVPSEEVVKKMKNYWRQLLNAKLITQRKFDNLTKAERGGL
SELDKAGFIKRQLVETRQITKHVAQILDSRMNTKYDENDKLIREVKVITLKSKLVSDFR
KDFQFYKVREINNYHHAHDAYLNAVVGTALIKKYPKLESEFVYGDYKVYDVRKMIAKSE
QEIGKATAKYFFYSNIMNFFKTEITLANGEIRKRPLIETNGETGEIVWDKGRDFATVRK
VLSMPQVNIVKKTEVQTGGFSKESILPKRNSDKLIARKKDWDPKKYGGFDSPTVAYSVL
VVAKVEKGKSKKLKSVKELLGITIMERSSFEKNPIDFLEAKGYKEVKKDLIIKLPKYSL
FELENGRKRMLASAGELQKGNELALPSKYVNFLYLASHYEKLKGSPEDNEQKQLFVEQH
KHYLDEIIEQISEFSKRVILADANLDKVLSAYNKHRDKPIREQAENIIHLFTLTNLGAP
AAFKYFDTTIDRKRYTSTKEVLDATLIHQSITGLYETRIDLSQLGGDSGGSGGSGGSTN
LSDIIEKETGKQLVIQESILMLPEEVEEVIGNKPESDILVHTAYDESTDENVMLLTSDA
PEYKPWALVIQDSNGENKIKMLSGGSGGSGGSTNLSDIIEKETGKQLVIQESILMLPEE
VEEVIGNKPESDILVHTAYDESTDENVMLLTSDAPEYKPWALVIQDSNGENKIKMLSGG
SPKKKRK
SaBE4: SEQ ID NO: 384
MSSETGPVAVDPTLRRRIEPHEFEVFFDPRELRKETCLLYEINWGGRHSIWRHTSQNTN
KHVEVNFIEKFTTERYFCPNTRCSITWFLSWSPCGECSRAITEFLSRYPHVTLFIYIAR
LYHHADPRNRQGLRDLISSGVTIQIMTEQESGYCWRNFVNYSPSNEAHWPRYPHLWVRL
YVLELYCIILGLPPCLNILRRKQPQLTFFTIALQSCHYQRLPPHILWATGLKSGGSSGG
SSGSETPGTSESATPESSGGSSGGSGKRNYILGLAIGITSVGYGIIDYETRDVIDAGVR
LFKEANVENNEGRRSKRGARRLKRRRRHRIQRVKKLLFDYNLLTDHSELSGINPYEARV
KGLSQKLSEEEFSAALLHLAKRRGVHNVNEVEEDTGNELSTKEQISRNSKALEEKYVAE
LQLERLKKDGEVRGSINRFKTSDYVKEAKQLLKVQKAYHQLDQSFIDTYIDLLETRRTY
YEGPGEGSPFGWKDIKEWYEMLMGHCTYFPEELRSVKYAYNADLYNALNDLNNLVITRD
ENEKLEYYEKFQIIENVFKQKKKPTLKQIAKEILVNEEDIKGYRVTSTGKPEFTNLKVY
HDIKDITARKEIIENAELLDQIAKILTIYQSSEDIQEELTNLNSELTQEEIEQISNLKG
YTGTHNLSLKAINLILDELWHTNDNQIAIFNRLKLVPKKVDLSQQKEIPTTLVDDFILS
PVVKRSFIQSIKVINAIIKKYGLPNDIIIELAREKNSKDAQKMINEMQKRNRQTNERIE
EIIRTTGKENAKYLIEKIKLHDMQEGKCLYSLEAIPLEDLLNNPFNYEVDHIIPRSVSF
DNSFNNKVLVKQEENSKKGNRTPFQYLSSSDSKISYETFKKHILNLAKGKGRISKTKKE
YLLEERDINRFSVQKDFINRNLVDTRYATRGLMNLLRSYFRVNNLDVKVKSINGGFTSF
LRRKWKFKKERNKGYKHHAEDALIIANADFIFKEWKKLDKAKKVMENQMFEEKQAESMP
EIETEQEYKEIFITPHQIKHIKDFKDYKYSHRVDKKPNRELINDTLYSTRKDDKGNTLI
VNNLNGLYDKDNDKLKKLINKSPEKLLMYHHDPQTYQKLKLIMEQYGDEKNPLYKYYEE
TGNYLTKYSKKDNGPVIKKIKYYGNKLNAHLDITDDYPNSRNKVVKLSLKPYRFDVYLD
NGVYKFVTVKNLDVIKKENYYEVNSKCYEEAKKLKKISNQAEFIASFYNNDLIKINGEL
YRVIGVNNDLLNRIEVNMIDITYREYLENMNDKRPPRIIKTIASKTQSIKKYSTDILGN
LYEVKSKKHPQIIKKGGSPKKKRKVSSDYKDHDGDYKDHDIDYKDDDDKSGGSGGSGGS
TNLSDIIEKETGKQLVIQESILMLPEEVEEVIGNKPESDILVHTAYDESTDENVMLLTS
DAPEYKPWALVIQDSNGENKIKMLSGGSGGSGGSTNLSDIIEKETGKQLVIQESILMLP
EEVEEVIGNKPESDILVHTAYDESTDENVMLLTSDAPEYKPWALVIQDSNGENKIKMLS
GGSPKKKRKV
SaBE4-Gam: SEQ ID NO: 385
MAKPAKRIKSAAAAYVPQNRDAVITDIKRIGDLQREASRLETEMNDAIAEITEKFAARI
APIKTDIETLSKGVQGWCEANRDELTNGGKVKTANLVTGDVSWRVRPPSVSIRGMDAVM
ETLERLGLQRFIRTKQEINKEAILLEPKAVAGVAGITVKSGIEDFSIIPFEQEAGISGS
ETPGTSESATPESSSETGPVAVDPTLRRRIEPHEFEVFFDPRELRKETCLLYEINWGGR
HSIWRHTSQNTNKHVEVNFIEKFTTERYFCPNTRCSITWFLSWSPCGECSRAITEFLSR
YPHVTLFIYIARLYHHADPRNRQGLRDLISSGVTIQIMTEQESGYCWRNFVNYSPSNEA
HWPRYPHLWVRLYVLELYCIILGLPPCLNILRRKQPQLTFFTIALQSCHYQRLPPHILW
ATGLKSGGSSGGSSGSETPGTSESATPESSGGSSGGSGKRNYILGLAIGITSVGYGIID
YETRDVIDAGVRLFKEANVENNEGRRSKRGARRLKRRRRHRIQRVKKLLFDYNLLTDHS
ELSGINPYEARVKGLSQKLSEEEFSAALLHLAKRRGVHNVNEVEEDTGNELSTKEQISR
NSKALEEKYVAELQLERLKKDGEVRGSINRFKTSDYVKEAKQLLKVQKAYHQLDQSFID
TYIDLLETRRTYYEGPGEGSPFGWKDIKEWYEMLMGHCTYFPEELRSVKYAYNADLYNA
LNDLNNLVITRDENEKLEYYEKFQIIENVFKQKKKPTLKQIAKEILVNEEDIKGYRVTS
TGKPEFTNLKVYHDIKDITARKEIIENAELLDQIAKILTIYQSSEDIQEELTNLNSELT
QEEIEQISNLKGYTGTHNLSLKAINLILDELWHTNDNQIAIFNRLKLVPKKVDLSQQKE
IPTTLVDDFILSPVVKRSFIQSIKVINAIIKKYGLPNDIIIELAREKNSKDAQKMINEM
QKRNRQTNERIEEIIRTTGKENAKYLIEKIKLHDMQEGKCLYSLEAIPLEDLLNNPFNY
EVDHIIPRSVSFDNSFNNKVLVKQEENSKKGNRTPFQYLSSSDSKISYETFKKHILNLA
KGKGRISKTKKEYLLEERDINRFSVQKDFINRNLVDTRYATRGLMNLLRSYFRVNNLDV
KVKSINGGFTSFLRRKWKFKKERNKGYKHHAEDALIIANADFIFKEWKKLDKAKKVMEN
QMFEEKQAESMPEIETEQEYKEIFITPHQIKHIKDFKDYKYSHRVDKKPNRELINDTLY
STRKDDKGNTLIVNNLNGLYDKDNDKLKKLINKSPEKLLMYHHDPQTYQKLKLIMEQYG
DEKNPLYKYYEETGNYLTKYSKKDNGPVIKKIKYYGNKLNAHLDITDDYPNSRNKVVKL
SLKPYRFDVYLDNGVYKFVTVKNLDVIKKENYYEVNSKCYEEAKKLKKISNQAEFIASF
YNNDLIKINGELYRVIGVNNDLLNRIEVNMIDITYREYLENMNDKRPPRIIKTIASKTQ
SIKKYSTDILGNLYEVKSKKHPQIIKKGGSPKKKRKVSSDYKDHDGDYKDHDIDYKDDD
DKSGGSGGSGGSTNLSDIIEKETGKQLVIQESILMLPEEVEEVIGNKPESDILVHTAYD
ESTDENVMLLTSDAPEYKPWALVIQDSNGENKIKMLSGGSGGSGGSTNLSDIIEKETGK
QLVIQESILMLPEEVEEVIGNKPESDILVHTAYDESTDENVMLLTSDAPEYKPWALVIQ
DSNGENKIKMLSGGSPKKKRKV
BE4max and AncBE4max, SEQ ID NO: 386
MKRTADGSEFESPKKKRKV [rat APOBEC1 or evoAPOBEC1, or FERNY,
or evoFERNY, or ancestral(anc) APOBEC, sequences see below]
SGGSSGGSSGSETPGTSESATPESSGGSSGGSDKKYSIGLAIGTNSVGWAVITDEYKVP
SKKFKVLGNTDRHSIKKNLIGALLFDSGETAEATRLKRTARRRYTRRKNRICYLQEIFS
NEMAKVDDSFFHRLEESFLVEEDKKHERHPIFGNIVDEVAYHEKYPTIYHLRKKLVDST
DKADLRLIYLALAHMIKFRGHFLIEGDLNPDNSDVDKLFIQLVQTYNQLFEENPINASG
VDAKAILSARLSKSRRLENLIAQLPGEKKNGLFGNLIALSLGLTPNFKSNFDLAEDAKL
QLSKDTYDDDLDNLLAQIGDQYADLFLAAKNLSDAILLSDILRVNTEITKAPLSASMIK
RYDEHHQDLTLLKALVRQQLPEKYKEIFFDQSKNGYAGYIDGGASQEEFYKFIKPILEK
MDGTEELLVKLNREDLLRKQRTFDNGSIPHQIHLGELHAILRRQEDFYPFLKDNREKIE
KILTFRIPYYVGPLARGNSRFAWMTRKSEETITPWNFEEVVDKGASAQSFIERMTNFDK
NLPNEKVLPKHSLLYEYFTVYNELTKVKYVTEGMRKPAFLSGEQKKAIVDLLFKTNRKV
TVKQLKEDYFKKIECFDSVEISGVEDRFNASLGTYHDLLKIIKDKDFLDNEENEDILED
IVLTLTLFEDREMIEERLKTYAHLFDDKVMKQLKRRRYTGWGRLSRKLINGIRDKQSGK
TILDFLKSDGFANRNFMQLIHDDSLTFKEDIQKAQVSGQGDSLHEHIANLAGSPAIKKG
ILQTVKVVDELVKVMGRHKPENIVIEMARENQTTQKGQKNSRERMKRIEEGIKELGSQI
LKEHPVENTQLQNEKLYLYYLQNGRDMYVDQELDINRLSDYDVDHIVPQSFLKDDSIDN
KVLTRSDKNRGKSDNVPSEEVVKKMKNYWRQLLNAKLITQRKFDNLTKAERGGLSELDK
AGFIKRQLVETRQITKHVAQILDSRMNTKYDENDKLIREVKVITLKSKLVSDFRKDFQF
YKVREINNYHHAHDAYLNAVVGTALIKKYPKLESEFVYGDYKVYDVRKMIAKSEQEIGK
ATAKYFFYSNIMNFFKTEITLANGEIRKRPLIETNGETGEIVWDKGRDFATVRKVLSMP
QVNIVKKTEVQTGGFSKESILPKRNSDKLIARKKDWDPKKYGGFDSPTVAYSVLVVAKV
EKGKSKKLKSVKELLGITIMERSSFEKNPIDFLEAKGYKEVKKDLIIKLPKYSLFELEN
GRKRMLASAGELQKGNELALPSKYVNFLYLASHYEKLKGSPEDNEQKQLFVEQHKHYLD
EIIEQISEFSKRVILADANLDKVLSAYNKHRDKPIREQAENIIHLFTLTNLGAPAAFKY
FDTTIDRKRYTSTKEVLDATLIHQSITGLYETRIDLSQLGGDSGGSGGSGGSTNLSDII
EKETGKQLVIQESILMLPEEVEEVIGNKPESDILVHTAYDESTDENVMLLTSDAPEYKP
WALVIQDSNGENKIKML_SGGSGGSGGS_TNLSDIIEKETGKQLVIQESILMLPEEVEE
VIGNKPESDILVHTAYDESTDENVMLLTSDAPEYKPWALVIQDSNGENKIKMLSGGSKR
TADGSEFEPKKKRKV
Rat APOBEC1, SEQ ID NO: 387
SSETGPVAVDPTLRRRIEPHEFEVFFDPRELRKETCLLYEINWGGRHSIWRHTSQNTNK
HVEVNFIEKFTTERYFCPNTRCSITWFLSWSPCGECSRAITEFLSRYPHVTLFIYIARL
YHHADPRNRQGLRDLISSGVTIQIMTEQESGYCWRNFVNYSPSNEAHWPRYPHLWVRLY
VLELYCIILGLPPCLNILRRKQPQLTFFTIALQSCHYQRLPPHILWATGLK
Anc689 APOBEC, SEQ ID NO: 388
SSETGPVAVDPTLRRRIEPHEFEVFFDPRELRKETCLLYEIKWGTSHKIWRHSSKNTTK
HVEVNFIEKFTSERHFCPSTSCSITWFLSWSPCGECSKAITEFLSQHPNVTLVIYVARL
YHHMDQQNRQGLRDLVNSGVTIQIMTAPEYDYCWRNFVNYPPGKEAHWPRYPPLWMKLY
ALELHAGILGLPPCLNILRRKQPQLTFFTIALQSCHYQRLPPHILWATGLK
Anc687 APOBEC, SEQ ID NO: 389
SSETGPVAVDPTLRRRIEPHEFEVFFDPRELRKEACLLYEIKWGTSHKIWRNSGKNTTK
HVEVNFIEKFTSERHFCPSISCSITWFLSWSPCWECSKAIREFLSQHPNVTLVIYVARL
FQHMDQQNRQGLRDLVNSGVTIQIMTASEYDHCWRNFVNYPPGKEAHWPRYPPLWMKLY
ALELHAGILGLPPCLNILRRKQPQLTFFTIALQSCHYQRLPPHILWATGLK
Anc686 APOBEC, SEQ ID NO: 390
SSETGPVAVDPTLRRRFEPEFFNRNYDPRELRKETYLLYEIKWGKESKIWRHTSNNRTQ
HAEVNFLENFFNELYFNPSTHCSITWFLSWSPCGECSKAIVEFLKEHPNVNLEIYVARL
YLCEDERNRQGLRDLVNSGVTIRIMNLPDYNYCWRTFVSHQGGDEDYWPRHFAPWVRLY
VLELYCIILGLPPCLNILRRKQPQLTFFTIALQSCHYQRLPPHILWATGLK
Anc655 APOBEC, SEQ ID NO: 391
SSETGPVAVDPTLRRRIEPFYFQFNNDPRACRRKTYLCYELKQDGSTWVWKRTLHNKGR
HAEICFLEKISSLEKLDPAQHYRITWYMSWSPCSNCAQKIVDFLKEHPHVNLRIYVARL
YYHEEERYQEGLRNLRRSGVSIRVMDLPDFEHCWETFVDNGGGPFQPWPGLEELNSKQL
SRRLQAGILGLPPCLNILRRKQPQLTFFTIALQSCHYQRLPPHILWATGLK
Anc733 APOBEC, SEQ ID NO: 392
SSETGPVAVDPTLRRRIEPFHFQFNNDPRAYRRKTYLCYELKQDGSTWVLDRTLRNKGR
HAEICFLDKINSWERLDPAQHYRVTWYMSWSPCSNCAQQVVDFLKEHPHVNLRIFAARL
YYHEQRRYQEGLRSLRGSGVPVAVMTLPDFEHCWETFVDHGGRPFQPWDGLEELNSRSL
SRRLQAGILGLPPCLNILRRKQPQLTFFTIALQSCHYQRLPPHILWATGLK
APOBEC ancestor #686, SEQ ID NO: 393
EFFNRNYDPRELRKETYLLYEIKWGKESKIWRHWCTSNNRTQHAEVNFLENFFNELYFN
PSTHCSITWFLSWSPCGECSKAIVEFLKEHPNVNLEIYVARLYLCEDERNRQGLRDLVN
SGVTIRIMNLPDYNYCWRTFVSHQGGDEDYWPRHFAPWVRL
APOBEC ancestor #733, SEQ ID NO: 394
FHFQFNNDPRAYRRKTYLCYELKQDGSTWVLDRGCTLRNKGRHAEICFLDKINSWERLD
PAQHYRVTWYMSWSPCSNCAQQVVDFLKEHPHVNLRIFAARLYYHEQRRYQEGLRSLRG
SGVPVAVMTLPDFEHCWETFVDHGGRPFQPWDGLEELNSRSLSRRLQAG
APOBEC ancestor #656_FERNY, SEQ ID NO: 395
FERNYDPRELRKETYLLYEIKWGKSGKLWRHWCQNNRTQHAEVYFLENIFNARRFNPST
HCSITWYLSWSPCAECSQKIVDFLKEHPNVNLEIYVARLYYHEDERNRQGLRDLVNSGV
TIRIMDLPDYNYCWKTFVSDQGGDEDYWPGHFAPWIKQYSLKL
APOBEC ancestor #655, SEQ ID NO: 396
FYFQFNNDPRACRRKTYLCYELKQDGSTWVWKRGCTLHNKGRHAEICFLEKISSLEKLD
PAQHYRITWYMSWSPCSNCAQKIVDFLKEHPHVNLRIYVARLYYHEEERYQEGLRNLRR
SGVSIRVMDLPDFEHCWETFVDNGGGPFQPWPGLEENSKQLSRRLQAG
APOBEC ancestor #649, SEQ ID NO: 397
FYEEFNNTLKSCRHKTLLCFSLKQDENTTLWKWGYAHNNGRHAEILVLREIENYEKLDP
AAKYRITLYMSYSPCNDCADKIVDFLKKHPNVNLNIKVSRLYYHEDEKYQEGLRNLKQP
GVSLKVMDRSDFEECFDLFVDPGGGEFQPWPGLEEKSKQYSATLQAG
evoFERNY-APOBEC1, SEQ ID NO: 398
SFERNYDPRELRKETYLLYEIKWGKSGKLWRHWCQNNRTQHAEVYFLENIFNARRFNPS
THCSITWYLSWSPCAECSQKIVDFLKEHPNVNLEIYVARLYYPENERNRQGLRDLVNSG
VTIRIMDLPDYNYCWKTFVSDQGGDEDYWPGHFAPWIKQYSLKL
evoAPOBEC1, SEQ ID NO: 399
SSKTGPVAVDPTLRRRIEPHEFEVFFDPRELRKETCLLYEINWGGRHSIWRHTSQNTNK
HVEVNFIEKFTTERYFCPNTRCSITWFLSWSPCGECSRAITEFLSRYPNVTLFIYIARL
YHLANPRNRQGLRDLISSGVTIQIMTEQESGYCWHNFVNYSPSNESHWPRYPHLWVRLY
VLELYCIILGLPPCLNILRRKQSQLTSFTIALQSCHYQRLPPHILWATGLK
ABE6.3, SEQ ID NO: 400
MSEVEFSHEYWMRHALTLAKRAWDEREVPVGAVLVHNNRVIGEGWNRPIGRHDPTAHAE
IMALRQGGLVMQNYRLIDATYVTLEPCVMCAGAMIHSRIGRVVFGARDAKTGAAGSLMD
VLHHPGMNHRVEITEGILADECAALLSDFFRMRRQEIKAQKKAQSSTDSGGSSGGSSGS
ETPGTSESATPESSGGSSGGSSEVEFSHEYWMRHALTLAKRAWDEREVPVGAVLVLNNR
VIGEGWNRSIGLHDPTAHAEIMALRQGGLVMQNYRLIDATLYVTFEPCVMCAGAMIHSR
IGRVVFGVRNAKTGAAGSLMDVLHYPGMNHRVEITEGILADECAALLCYFFRMRRQVFN
AQKKAQSSTDSGGSSGGSSGSETPGTSESATPESSGGSSGGSDKKYSIGLAIGTNSVGW
AVITDEYKVPSKKFKVLGNTDRHSIKKNLIGALLFDSGETAEATRLKRTARRRYTRRKN
RICYLQEIFSNEMAKVDDSFFHRLEESFLVEEDKKHERHPIFGNIVDEVAYHEKYPTIY
HLRKKLVDSTDKADLRLIYLALAHMIKFRGHFLIEGDLNPDNSDVDKLFIQLVQTYNQL
FEENPINASGVDAKAILSARLSKSRRLENLIAQLPGEKKNGLFGNLIALSLGLTPNFKS
NFDLAEDAKLQLSKDTYDDDLDNLLAQIGDQYADLFLAAKNLSDAILLSDILRVNTEIT
KAPLSASMIKRYDEHHQDLTLLKALVRQQLPEKYKEIFFDQSKNGYAGYIDGGASQEEF
YKFIKPILEKMDGTEELLVKLNREDLLRKQRTFDNGSIPHQIHLGELHAILRRQEDFYP
FLKDNREKIEKILTFRIPYYVGPLARGNSRFAWMTRKSEETITPWNFEEVVDKGASAQS
FIERMTNFDKNLPNEKVLPKHSLLYEYFTVYNELTKVKYVTEGMRKPAFLSGEQKKAIV
DLLFKTNRKVTVKQLKEDYFKKIECFDSVEISGVEDRFNASLGTYHDLLKIIKDKDFLD
NEENEDILEDIVLTLTLFEDREMIEERLKTYAHLFDDKVMKQLKRRRYTGWGRLSRKLI
NGIRDKQSGKTILDFLKSDGFANRNFMQLIHDDSLTFKEDIQKAQVSGQGDSLHEHIAN
LAGSPAIKKGILQTVKVVDELVKVMGRHKPENIVIEMARENQTTQKGQKNSRERMKRIE
EGIKELGSQILKEHPVENTQLQNEKLYLYYLQNGRDMYVDQELDINRLSDYDVDHIVPQ
SFLKDDSIDNKVLTRSDKNRGKSDNVPSEEVVKKMKNYWRQLLNAKLITQRKFDNLTKA
ERGGLSELDKAGFIKRQLVETRQITKHVAQILDSRMNTKYDENDKLIREVKVITLKSKL
VSDFRKDFQFYKVREINNYHHAHDAYLNAVVGTALIKKYPKLESEFVYGDYKVYDVRKM
IAKSEQEIGKATAKYFFYSNIMNFFKTEITLANGEIRKRPLIETNGETGEIVWDKGRDF
ATVRKVLSMPQVNIVKKTEVQTGGFSKESILPKRNSDKLIARKKDWDPKKYGGFDSPTV
AYSVLVVAKVEKGKSKKLKSVKELLGITIMERSSFEKNPIDFLEAKGYKEVKKDLIIKL
PKYSLFELENGRKRMLASAGELQKGNELALPSKYVNFLYLASHYEKLKGSPEDNEQKQL
FVEQHKHYLDEIIEQISEFSKRVILADANLDKVLSAYNKHRDKPIREQAENIIHLFTLT
NLGAPAAFKYFDTTIDRKRYTSTKEVLDATLIHQSITGLYETRIDLSQLGGDSGGSPKK
KRKV
ABE7.8, SEQ ID NO: 401
MSEVEFSHEYWMRHALTLAKRAWDEREVPVGAVLVHNNRVIGEGWNRPIGRHDPTAHAE
IMALRQGGLVMQNYRLIDATLYVTLEPCVMCAGAMIHSRIGRVVFGARDAKTGAAGSLM
DVLHHPGMNHRVEITEGILADECAALLSDFFRMRRQEIKAQKKAQSSTDSGGSSGGSSG
SETPGTSESATPESSGGSSGGSSEVEFSHEYWMRHALTLAKRALDEREVPVGAVLVLNN
RVIGEGWNRAIGLHDPTAHAEIMALRQGGLVMQNYRLIDATLYVTFEPCVMCAGAMIHS
RIGRVVFGVRNAKTGAAGSLMDVLHYPGMNHRVEITEGILADECNALLCYFFRMRRQVF
NAQKKAQSSTDSGGSSGGSSGSETPGTSESATPESSGGSSGGSDKKYSIGLAIGTNSVG
WAVITDEYKVPSKKFKVLGNTDRHSIKKNLIGALLFDSGETAEATRLKRTARRRYTRRK
NRICYLQEIFSNEMAKVDDSFFHRLEESFLVEEDKKHERHPIFGNIVDEVAYHEKYPTI
YHLRKKLVDSTDKADLRLIYLALAHMIKFRGHFLIEGDLNPDNSDVDKLFIQLVQTYNQ
LFEENPINASGVDAKAILSARLSKSRRLENLIAQLPGEKKNGLFGNLIALSLGLTPNFK
SNFDLAEDAKLQLSKDTYDDDLDNLLAQIGDQYADLFLAAKNLSDAILLSDILRVNTEI
TKAPLSASMIKRYDEHHQDLTLLKALVRQQLPEKYKEIFFDQSKNGYAGYIDGGASQEE
FYKFIKPILEKMDGTEELLVKLNREDLLRKQRTFDNGSIPHQIHLGELHAILRRQEDFY
PFLKDNREKIEKILTFRIPYYVGPLARGNSRFAWMTRKSEETITPWNFEEVVDKGASAQ
SFIERMTNFDKNLPNEKVLPKHSLLYEYFTVYNELTKVKYVTEGMRKPAFLSGEQKKAI
VDLLFKTNRKVTVKQLKEDYFKKIECFDSVEISGVEDRFNASLGTYHDLLKIIKDKDFL
DNEENEDILEDIVLTLTLFEDREMIEERLKTYAHLFDDKVMKQLKRRRYTGWGRLSRKL
INGIRDKQSGKTILDFLKSDGFANRNFMQLIHDDSLTFKEDIQKAQVSGQGDSLHEHIA
NLAGSPAIKKGILQTVKVVDELVKVMGRHKPENIVIEMARENQTTQKGQKNSRERMKRI
EEGIKELGSQILKEHPVENTQLQNEKLYLYYLQNGRDMYVDQELDINRLSDYDVDHIVP
QSFLKDDSIDNKVLTRSDKNRGKSDNVPSEEVVKKMKNYWRQLLNAKLITQRKFDNLTK
AERGGLSELDKAGFIKRQLVETRQITKHVAQILDSRMNTKYDENDKLIREVKVITLKSK
LVSDFRKDFQFYKVREINNYHHAHDAYLNAVVGTALIKKYPKLESEFVYGDYKVYDVRK
MIAKSEQEIGKATAKYFFYSNIMNFFKTEITLANGEIRKRPLIETNGETGEIVWDKGRD
FATVRKVLSMPQVNIVKKTEVQTGGFSKESILPKRNSDKLIARKKDWDPKKYGGFDSPT
VAYSVLVVAKVEKGKSKKLKSVKELLGITIMERSSFEKNPIDFLEAKGYKEVKKDLIIK
LPKYSLFELENGRKRMLASAGELQKGNELALPSKYVNFLYLASHYEKLKGSPEDNEQKQ
LFVEQHKHYLDEIIEQISEFSKRVILADANLDKVLSAYNKHRDKPIREQAENIIHLFTL
TNLGAPAAFKYFDTTIDRKRYTSTKEVLDATLIHQSITGLYETRIDLSQLGGDSGGSPK
KKRKV
ABE7.9, SEQ ID NO: 402
MSEVEFSHEYWMRHALTLAKRAWDEREVPVGAVLVHNNRVIGEGWNRPIGRHDPTAHAE
IMALRQGGLVMQNYRLIDATLYVTLEPCVMCAGAMIHSRIGRVVFGARDAKTGAAGSLM
DVLHHPGMNHRVEITEGILADECAALLSDFFRMRRQEIKAQKKAQSSTDSGGSSGGSSG
SETPGTSESATPESSGGSSGGSSEVEFSHEYWMRHALTLAKRALDEREVPVGAVLVLNN
RVIGEGWNRAIGLHDPTAHAEIMALRQGGLVMQNYRLIDATLYVTFEPCVMCAGAMIHS
RIGRVVFGVRNAKTGAAGSLMDVLHYPGMNHRVEITEGILADECNALLCYFFRMPRQVF
NAQKKAQSSTDSGGSSGGSSGSETPGTSESATPESSGGSSGGSDKKYSIGLAIGTNSVG
WAVITDEYKVPSKKFKVLGNTDRHSIKKNLIGALLFDSGETAEATRLKRTARRRYTRRK
NRICYLQEIFSNEMAKVDDSFFHRLEESFLVEEDKKHERHPIFGNIVDEVAYHEKYPTI
YHLRKKLVDSTDKADLRLIYLALAHMIKFRGHFLIEGDLNPDNSDVDKLFIQLVQTYNQ
LFEENPINASGVDAKAILSARLSKSRRLENLIAQLPGEKKNGLFGNLIALSLGLTPNFK
SNFDLAEDAKLQLSKDTYDDDLDNLLAQIGDQYADLFLAAKNLSDAILLSDILRVNTEI
TKAPLSASMIKRYDEHHQDLTLLKALVRQQLPEKYKEIFFDQSKNGYAGYIDGGASQEE
FYKFIKPILEKMDGTEELLVKLNREDLLRKQRTFDNGSIPHQIHLGELHAILRRQEDFY
PFLKDNREKIEKILTFRIPYYVGPLARGNSRFAWMTRKSEETITPWNFEEVVDKGASAQ
SFIERMTNFDKNLPNEKVLPKHSLLYEYFTVYNELTKVKYVTEGMRKPAFLSGEQKKAI
VDLLFKTNRKVTVKQLKEDYFKKIECFDSVEISGVEDRFNASLGTYHDLLKIIKDKDFL
DNEENEDILEDIVLTLTLFEDREMIEERLKTYAHLFDDKVMKQLKRRRYTGWGRLSRKL
INGIRDKQSGKTILDFLKSDGFANRNFMQLIHDDSLTFKEDIQKAQVSGQGDSLHEHIA
NLAGSPAIKKGILQTVKVVDELVKVMGRHKPENIVIEMARENQTTQKGQKNSRERMKRI
EEGIKELGSQILKEHPVENTQLQNEKLYLYYLQNGRDMYVDQELDINRLSDYDVDHIVP
QSFLKDDSIDNKVLTRSDKNRGKSDNVPSEEVVKKMKNYWRQLLNAKLITQRKFDNLTK
AERGGLSELDKAGFIKRQLVETRQITKHVAQILDSRMNTKYDENDKLIREVKVITLKSK
LVSDFRKDFQFYKVREINNYHHAHDAYLNAVVGTALIKKYPKLESEFVYGDYKVYDVRK
MIAKSEQEIGKATAKYFFYSNIMNFFKTEITLANGEIRKRPLIETNGETGEIVWDKGRD
FATVRKVLSMPQVNIVKKTEVQTGGFSKESILPKRNSDKLIARKKDWDPKKYGGFDSPT
VAYSVLVVAKVEKGKSKKLKSVKELLGITIMERSSFEKNPIDFLEAKGYKEVKKDLIIK
LPKYSLFELENGRKRMLASAGELQKGNELALPSKYVNFLYLASHYEKLKGSPEDNEQKQ
LFVEQHKHYLDEIIEQISEFSKRVILADANLDKVLSAYNKHRDKPIREQAENIIHLFTL
TNLGAPAAFKYFDTTIDRKRYTSTKEVLDATLIHQSITGLYETRIDLSQLGGDSGGSPK
KKRKV
ABE7.10, SEQ ID NO: 403
MSEVEFSHEYWMRHALTLAKRAWDEREVPVGAVLVHNNRVIGEGWNRPIGRHDPTAHAE
IMALRQGGLVMQNYRLIDATLYVTLEPCVMCAGAMIHSRIGRVVFGARDAKTGAAGSLM
DVLHHPGMNHRVEITEGILADECAALLSDFFRMRRQEIKAQKKAQSSTDSGGSSGGSSG
SETPGTSESATPESSGGSSGGSSEVEFSHEYWMRHALTLAKRARDEREVPVGAVLVLNN
RVIGEGWNRAIGLHDPTAHAEIMALRQGGLVMQNYRLIDATLYVTFEPCVMCAGAMIHS
RIGRVVFGVRNAKTGAAGSLMDVLHYPGMNHRVEITEGILADECAALLCYFFRMPRQVF
NAQKKAQSSTDSGGSSGGSSGSETPGTSESATPESSGGSSGGSDKKYSIGLAIGTNSVG
WAVITDEYKVPSKKFKVLGNTDRHSIKKNLIGALLFDSGETAEATRLKRTARRRYTRRK
NRICYLQEIFSNEMAKVDDSFFHRLEESFLVEEDKKHERHPIFGNIVDEVAYHEKYPTI
YHLRKKLVDSTDKADLRLIYLALAHMIKFRGHFLIEGDLNPDNSDVDKLFIQLVQTYNQ
LFEENPINASGVDAKAILSARLSKSRRLENLIAQLPGEKKNGLFGNLIALSLGLTPNFK
SNFDLAEDAKLQLSKDTYDDDLDNLLAQIGDQYADLFLAAKNLSDAILLSDILRVNTEI
TKAPLSASMIKRYDEHHQDLTLLKALVRQQLPEKYKEIFFDQSKNGYAGYIDGGASQEE
FYKFIKPILEKMDGTEELLVKLNREDLLRKQRTFDNGSIPHQIHLGELHAILRRQEDFY
PFLKDNREKIEKILTFRIPYYVGPLARGNSRFAWMTRKSEETITPWNFEEVVDKGASAQ
SFIERMTNFDKNLPNEKVLPKHSLLYEYFTVYNELTKVKYVTEGMRKPAFLSGEQKKAI
VDLLFKTNRKVTVKQLKEDYFKKIECFDSVEISGVEDRFNASLGTYHDLLKIIKDKDFL
DNEENEDILEDIVLTLTLFEDREMIEERLKTYAHLFDDKVMKQLKRRRYTGWGRLSRKL
INGIRDKQSGKTILDFLKSDGFANRNFMQLIHDDSLTFKEDIQKAQVSGQGDSLHEHIA
NLAGSPAIKKGILQTVKVVDELVKVMGRHKPENIVIEMARENQTTQKGQKNSRERMKRI
EEGIKELGSQILKEHPVENTQLQNEKLYLYYLQNGRDMYVDQELDINRLSDYDVDHIVP
QSFLKDDSIDNKVLTRSDKNRGKSDNVPSEEVVKKMKNYWRQLLNAKLITQRKFDNLTK
AERGGLSELDKAGFIKRQLVETRQITKHVAQILDSRMNTKYDENDKLIREVKVITLKSK
LVSDFRKDFQFYKVREINNYHHAHDAYLNAVVGTALIKKYPKLESEFVYGDYKVYDVRK
MIAKSEQEIGKATAKYFFYSNIMNFFKTEITLANGEIRKRPLIETNGETGEIVWDKGRD
FATVRKVLSMPQVNIVKKTEVQTGGFSKESILPKRNSDKLIARKKDWDPKKYGGFDSPT
VAYSVLVVAKVEKGKSKKLKSVKELLGITIMERSSFEKNPIDFLEAKGYKEVKKDLIIK
LPKYSLFELENGRKRMLASAGELQKGNELALPSKYVNFLYLASHYEKLKGSPEDNEQKQ
LFVEQHKHYLDEIIEQISEFSKRVILADANLDKVLSAYNKHRDKPIREQAENIIHLFTL
TNLGAPAAFKYFDTTIDRKRYTSTKEVLDATLIHQSITGLYETRIDLSQLGGDSGGSPK
KKRKV
ABEmax, SEQ ID NO: 404
MKRTADGSEFESPKKKRKVSEVEFSHEYWMRHALTLAKRAWDEREVPVGAVLVHNNRVI
GEGWNRPIGRHDPTAHAEIMALRQGGLVMQNYRLIDATLYVTLEPCVMCAGAMIHSRIG
RVVFGARDAKTGAAGSLMDVLHHPGMNHRVEITEGILADECAALLSDFFRMRRQEIKAQ
KKAQSSTDSGGSSGGSSGSETPGTSESATPESSGGSSGGSSEVEFSHEYWMRHALTLAK
RARDEREVPVGAVLVLNNRVIGEGWNRAIGLHDPTAHAEIMALRQGGLVMQNYRLIDAT
LYVTFEPCVMCAGAMIHSRIGRVVFGVRNAKTGAAGSLMDVLHYPGMNHRVEITEGILA
DECAALLCYFFRMPRQVFNAQKKAQSSTDSGGSSGGSSGSETPGTSESATPESSGGSSG
GSDKKYSIGLAIGTNSVGWAVITDEYKVPSKKFKVLGNTDRHSIKKNLIGALLFDSGET
AEATRLKRTARRRYTRRKNRICYLQEIFSNEMAKVDDSFFHRLEESFLVEEDKKHERHP
IFGNIVDEVAYHEKYPTIYHLRKKLVDSTDKADLRLIYLALAHMIKFRGHFLIEGDLNP
DNSDVDKLFIQLVQTYNQLFEENPINASGVDAKAILSARLSKSRRLENLIAQLPGEKKN
GLFGNLIALSLGLTPNFKSNFDLAEDAKLQLSKDTYDDDLDNLLAQIGDQYADLFLAAK
NLSDAILLSDILRVNTEITKAPLSASMIKRYDEHHQDLTLLKALVRQQLPEKYKEIFFD
QSKNGYAGYIDGGASQEEFYKFIKPILEKMDGTEELLVKLNREDLLRKQRTFDNGSIPH
QIHLGELHAILRRQEDFYPFLKDNREKIEKILTFRIPYYVGPLARGNSRFAWMTRKSEE
TITPWNFEEVVDKGASAQSFIERMTNFDKNLPNEKVLPKHSLLYEYFTVYNELTKVKYV
TEGMRKPAFLSGEQKKAIVDLLFKTNRKVTVKQLKEDYFKKIECFDSVEISGVEDRFNA
SLGTYHDLLKIIKDKDFLDNEENEDILEDIVLTLTLFEDREMIEERLKTYAHLFDDKVM
KQLKRRRYTGWGRLSRKLINGIRDKQSGKTILDFLKSDGFANRNFMQLIHDDSLTFKED
IQKAQVSGQGDSLHEHIANLAGSPAIKKGILQTVKVVDELVKVMGRHKPENIVIEMARE
NQTTQKGQKNSRERMKRIEEGIKELGSQILKEHPVENTQLQNEKLYLYYLQNGRDMYVD
QELDINRLSDYDVDHIVPQSFLKDDSIDNKVLTRSDKNRGKSDNVPSEEVVKKMKNYWR
QLLNAKLITQRKFDNLTKAERGGLSELDKAGFIKRQLVETRQITKHVAQILDSRMNTKY
DENDKLIREVKVITLKSKLVSDFRKDFQFYKVREINNYHHAHDAYLNAVVGTALIKKYP
KLESEFVYGDYKVYDVRKMIAKSEQEIGKATAKYFFYSNIMNFFKTEITLANGEIRKRP
LIETNGETGEIVWDKGRDFATVRKVLSMPQVNIVKKTEVQTGGFSKESILPKRNSDKLI
ARKKDWDPKKYGGFDSPTVAYSVLVVAKVEKGKSKKLKSVKELLGITIMERSSFEKNPI
DFLEAKGYKEVKKDLIIKLPKYSLFELENGRKRMLASAGELQKGNELALPSKYVNFLYL
ASHYEKLKGSPEDNEQKQLFVEQHKHYLDEIIEQISEFSKRVILADANLDKVLSAYNKH
RDKPIREQAENIIHLFTLTNLGAPAAFKYFDTTIDRKRYTSTKEVLDATLIHQSITGLY
ETRIDLSQLGGDSGGSKRTADGSEFEPKKKRKV
miniABEmax, SEQ ID NO: 405
NLS-tadA(7.10)-32AA linker*-hSpCas9n(D10A)-NLS-P2A-EGFP-NLS
MKRTADGSEFESPKKKRKVSEVEFSHEYWMRHALTLAKRARDEREVPVGAVLVLNNRVI
GEGWNRAIGLHDPTAHAEIMALRQGGLVMQNYRLIDATLYVTFEPCVMCAGAMIHSRIG
RVVFGVRNAKTGAAGSLMDVLHYPGMNHRVEITEGILADECAALLCYFFRMPRQVFNAQ
KKAQSSTDSGGSSGGSSGSETPGTSESATPESSGGSSGGSDKKYSIGLAIGTNSVGWAV
ITDEYKVPSKKFKVLGNTDRHSIKKNLIGALLFDSGETAEATRLKRTARRRYTRRKNRI
CYLQEIFSNEMAKVDDSFFHRLEESFLVEEDKKHERHPIFGNIVDEVAYHEKYPTIYHL
RKKLVDSTDKADLRLIYLALAHMIKFRGHFLIEGDLNPDNSDVDKLFIQLVQTYNQLFE
ENPINASGVDAKAILSARLSKSRRLENLIAQLPGEKKNGLFGNLIALSLGLTPNFKSNF
DLAEDAKLQLSKDTYDDDLDNLLAQIGDQYADLFLAAKNLSDAILLSDILRVNTEITKA
PLSASMIKRYDEHHQDLTLLKALVRQQLPEKYKEIFFDQSKNGYAGYIDGGASQEEFYK
FIKPILEKMDGTEELLVKLNREDLLRKQRTFDNGSIPHQIHLGELHAILRRQEDFYPFL
KDNREKIEKILTFRIPYYVGPLARGNSRFAWMTRKSEETITPWNFEEVVDKGASAQSFI
ERMTNFDKNLPNEKVLPKHSLLYEYFTVYNELTKVKYVTEGMRKPAFLSGEQKKAIVDL
LFKTNRKVTVKQLKEDYFKKIECFDSVEISGVEDRFNASLGTYHDLLKIIKDKDFLDNE
ENEDILEDIVLTLTLFEDREMIEERLKTYAHLFDDKVMKQLKRRRYTGWGRLSRKLING
IRDKQSGKTILDFLKSDGFANRNFMQLIHDDSLTFKEDIQKAQVSGQGDSLHEHIANLA
GSPAIKKGILQTVKVVDELVKVMGRHKPENIVIEMARENQTTQKGQKNSRERMKRIEEG
IKELGSQILKEHPVENTQLQNEKLYLYYLQNGRDMYVDQELDINRLSDYDVDHIVPQSF
LKDDSIDNKVLTRSDKNRGKSDNVPSEEVVKKMKNYWRQLLNAKLITQRKFDNLTKAER
GGLSELDKAGFIKRQLVETRQITKHVAQILDSRMNTKYDENDKLIREVKVITLKSKLVS
DFRKDFQFYKVREINNYHHAHDAYLNAVVGTALIKKYPKLESEFVYGDYKVYDVRKMIA
KSEQEIGKATAKYFFYSNIMNFFKTEITLANGEIRKRPLIETNGETGEIVWDKGRDFAT
VRKVLSMPQVNIVKKTEVQTGGFSKESILPKRNSDKLIARKKDWDPKKYGGFDSPTVAY
SVLVVAKVEKGKSKKLKSVKELLGITIMERSSFEKNPIDFLEAKGYKEVKKDLIIKLPK
YSLFELENGRKRMLASAGELQKGNELALPSKYVNFLYLASHYEKLKGSPEDNEQKQLFV
EQHKHYLDEIIEQISEFSKRVILADANLDKVLSAYNKHRDKPIREQAENIIHLFTLTNL
GAPAAFKYFDTTIDRKRYTSTKEVLDATLIHQSITGLYETRIDLSQLGGDSGGSKRTAD
GSEFEPKKKRKVGSGATNFSLLKQAGDVEENPGPMVSKGEELFTGVVPILVELDGDVNG
HKFSVSGEGEGDATYGKLTLKFICTTGKLPVPWPTLVTTLTYGVQCFSRYPDHMKQHDF
FKSAMPEGYVQERTIFFKDDGNYKTRAEVKFEGDTLVNRIELKGIDFKEDGNILGHKLE
YNYNSHNVYIMADKQKNGIKVNFKIRHNIEDGSVQLADHYQQNTPIGDGPVLLPDNHYL
STQSALSKDPNEKRDHMVLLEFVTAAGITLGMDELYKSGGSPKKKRKV
miniABEmax-V82G, SEQ ID NO: 406:
MKRTADGSEFESPKKKRKVSEVEFSHEYWMRHALTLAKRARDEREVPVGAVLVLNNRVI
GEGWNRAIGLHDPTAHAEIMALRQGGLVMQNYRLIDATLYGTFEPCVMCAGAMIHSRIG
RVVFGVRNAKTGAAGSLMDVLHYPGMNHRVEITEGILADECAALLCYFFRMPRQVFNAQ
KKAQSSTDSGGSSGGSSGSETPGTSESATPESSGGSSGGSDKKYSIGLAIGTNSVGWAV
ITDEYKVPSKKFKVLGNTDRHSIKKNLIGALLFDSGETAEATRLKRTARRRYTRRKNRI
CYLQEIFSNEMAKVDDSFFHRLEESFLVEEDKKHERHPIFGNIVDEVAYHEKYPTIYHL
RKKLVDSTDKADLRLIYLALAHMIKFRGHFLIEGDLNPDNSDVDKLFIQLVQTYNQLFE
ENPINASGVDAKAILSARLSKSRRLENLIAQLPGEKKNGLFGNLIALSLGLTPNFKSNF
DLAEDAKLQLSKDTYDDDLDNLLAQIGDQYADLFLAAKNLSDAILLSDILRVNTEITKA
PLSASMIKRYDEHHQDLTLLKALVRQQLPEKYKEIFFDQSKNGYAGYIDGGASQEEFYK
FIKPILEKMDGTEELLVKLNREDLLRKQRTFDNGSIPHQIHLGELHAILRRQEDFYPFL
KDNREKIEKILTFRIPYYVGPLARGNSRFAWMTRKSEETITPWNFEEVVDKGASAQSFI
ERMTNFDKNLPNEKVLPKHSLLYEYFTVYNELTKVKYVTEGMRKPAFLSGEQKKAIVDL
LFKTNRKVTVKQLKEDYFKKIECFDSVEISGVEDRFNASLGTYHDLLKIIKDKDFLDNE
ENEDILEDIVLTLTLFEDREMIEERLKTYAHLFDDKVMKQLKRRRYTGWGRLSRKLING
IRDKQSGKTILDFLKSDGFANRNFMQLIHDDSLTFKEDIQKAQVSGQGDSLHEHIANLA
GSPAIKKGILQTVKVVDELVKVMGRHKPENIVIEMARENQTTQKGQKNSRERMKRIEEG
IKELGSQILKEHPVENTQLQNEKLYLYYLQNGRDMYVDQELDINRLSDYDVDHIVPQSF
LKDDSIDNKVLTRSDKNRGKSDNVPSEEVVKKMKNYWRQLLNAKLITQRKFDNLTKAER
GGLSELDKAGFIKRQLVETRQITKHVAQILDSRMNTKYDENDKLIREVKVITLKSKLVS
DFRKDFQFYKVREINNYHHAHDAYLNAVVGTALIKKYPKLESEFVYGDYKVYDVRKMIA
KSEQEIGKATAKYFFYSNIMNFFKTEITLANGEIRKRPLIETNGETGEIVWDKGRDFAT
VRKVLSMPQVNIVKKTEVQTGGFSKESILPKRNSDKLIARKKDWDPKKYGGFDSPTVAY
SVLVVAKVEKGKSKKLKSVKELLGITIMERSSFEKNPIDFLEAKGYKEVKKDLIIKLPK
YSLFELENGRKRMLASAGELQKGNELALPSKYVNFLYLASHYEKLKGSPEDNEQKQLFV
EQHKHYLDEIIEQISEFSKRVILADANLDKVLSAYNKHRDKPIREQAENIIHLFTLTNL
GAPAAFKYFDTTIDRKRYTSTKEVLDATLIHQSITGLYETRIDLSQLGGDSGGSKRTAD
GSEFEPKKKRKVGSGATNFSLLKQAGDVEENPGPMVSKGEELFTGVVPILVELDGDVNG
HKFSVSGEGEGDATYGKLTLKFICTTGKLPVPWPTLVTTLTYGVQCFSRYPDHMKQHDF
FKSAMPEGYVQERTIFFKDDGNYKTRAEVKFEGDTLVNRIELKGIDFKEDGNILGHKLE
YNYNSHNVYIMADKQKNGIKVNFKIRHNIEDGSVQLADHYQQNTPIGDGPVLLPDNHYL
STQSALSKDPNEKRDHMVLLEFVTAAGITLGMDELYKSGGSPKKKRKV
miniABEmax-K20A/R21A, SEQ ID NO: 407:
MKRTADGSEFESPKKKRKVSEVEFSHEYWMRHALTLAAAARDEREVPVGAVLVLNNRVI
GEGWNRAIGLHDPTAHAEIMALRQGGLVMQNYRLIDATLYVTFEPCVMCAGAMIHSRIG
RVVFGVRNAKTGAAGSLMDVLHYPGMNHRVEITEGILADECAALLCYFFRMPRQVFNAQ
KKAQSSTDSGGSSGGSSGSETPGTSESATPESSGGSSGGSDKKYSIGLAIGTNSVGWAV
ITDEYKVPSKKFKVLGNTDRHSIKKNLIGALLFDSGETAEATRLKRTARRRYTRRKNRI
CYLQEIFSNEMAKVDDSFFHRLEESFLVEEDKKHERHPIFGNIVDEVAYHEKYPTIYHL
RKKLVDSTDKADLRLIYLALAHMIKFRGHFLIEGDLNPDNSDVDKLFIQLVQTYNQLFE
ENPINASGVDAKAILSARLSKSRRLENLIAQLPGEKKNGLFGNLIALSLGLTPNFKSNF
DLAEDAKLQLSKDTYDDDLDNLLAQIGDQYADLFLAAKNLSDAILLSDILRVNTEITKA
PLSASMIKRYDEHHQDLTLLKALVRQQLPEKYKEIFFDQSKNGYAGYIDGGASQEEFYK
FIKPILEKMDGTEELLVKLNREDLLRKQRTFDNGSIPHQIHLGELHAILRRQEDFYPFL
KDNREKIEKILTFRIPYYVGPLARGNSRFAWMTRKSEETITPWNFEEVVDKGASAQSFI
ERMTNFDKNLPNEKVLPKHSLLYEYFTVYNELTKVKYVTEGMRKPAFLSGEQKKAIVDL
LFKTNRKVTVKQLKEDYFKKIECFDSVEISGVEDRFNASLGTYHDLLKIIKDKDFLDNE
ENEDILEDIVLTLTLFEDREMIEERLKTYAHLFDDKVMKQLKRRRYTGWGRLSRKLING
IRDKQSGKTILDFLKSDGFANRNFMQLIHDDSLTFKEDIQKAQVSGQGDSLHEHIANLA
GSPAIKKGILQTVKVVDELVKVMGRHKPENIVIEMARENQTTQKGQKNSRERMKRIEEG
IKELGSQILKEHPVENTQLQNEKLYLYYLQNGRDMYVDQELDINRLSDYDVDHIVPQSF
LKDDSIDNKVLTRSDKNRGKSDNVPSEEVVKKMKNYWRQLLNAKLITQRKFDNLTKAER
GGLSELDKAGFIKRQLVETRQITKHVAQILDSRMNTKYDENDKLIREVKVITLKSKLVS
DFRKDFQFYKVREINNYHHAHDAYLNAVVGTALIKKYPKLESEFVYGDYKVYDVRKMIA
KSEQEIGKATAKYFFYSNIMNFFKTEITLANGEIRKRPLIETNGETGEIVWDKGRDFAT
VRKVLSMPQVNIVKKTEVQTGGFSKESILPKRNSDKLIARKKDWDPKKYGGFDSPTVAY
SVLVVAKVEKGKSKKLKSVKELLGITIMERSSFEKNPIDFLEAKGYKEVKKDLIIKLPK
YSLFELENGRKRMLASAGELQKGNELALPSKYVNFLYLASHYEKLKGSPEDNEQKQLFV
EQHKHYLDEIIEQISEFSKRVILADANLDKVLSAYNKHRDKPIREQAENIIHLFTLTNL
GAPAAFKYFDTTIDRKRYTSTKEVLDATLIHQSITGLYETRIDLSQLGGDSGGSKRTAD
GSEFEPKKKRKVGSGATNFSLLKQAGDVEENPGPMVSKGEELFTGVVPILVELDGDVNG
HKFSVSGEGEGDATYGKLTLKFICTTGKLPVPWPTLVTTLTYGVQCFSRYPDHMKQHDF
FKSAMPEGYVQERTIFFKDDGNYKTRAEVKFEGDTLVNRIELKGIDFKEDGNILGHKLE
YNYNSHNVYIMADKQKNGIKVNFKIRHNIEDGSVQLADHYQQNTPIGDGPVLLPDNHYL
STQSALSKDPNEKRDHMVLLEFVTAAGITLGMDELYKSGGSPKKKRKV
miniABEmax-V106W, SEQ ID NO: 408:
MKRTADGSEFESPKKKRKVSEVEFSHEYWMRHALTLAKRARDEREVPVGAVLVLNNRVI
GEGWNRAIGLHDPTAHAEIMALRQGGLVMQNYRLIDATLYVTFEPCVMCAGAMIHSRIG
RVVFGWRNAKTGAAGSLMDVLHYPGMNHRVEITEGILADECAALLCYFFRMPRQVFNAQ
KKAQSSTDSGGSSGGSSGSETPGTSESATPESSGGSSGGSDKKYSIGLAIGTNSVGWAV
ITDEYKVPSKKFKVLGNTDRHSIKKNLIGALLFDSGETAEATRLKRTARRRYTRRKNRI
CYLQEIFSNEMAKVDDSFFHRLEESFLVEEDKKHERHPIFGNIVDEVAYHEKYPTIYHL
RKKLVDSTDKADLRLIYLALAHMIKFRGHFLIEGDLNPDNSDVDKLFIQLVQTYNQLFE
ENPINASGVDAKAILSARLSKSRRLENLIAQLPGEKKNGLFGNLIALSLGLTPNFKSNF
DLAEDAKLQLSKDTYDDDLDNLLAQIGDQYADLFLAAKNLSDAILLSDILRVNTEITKA
PLSASMIKRYDEHHQDLTLLKALVRQQLPEKYKEIFFDQSKNGYAGYIDGGASQEEFYK
FIKPILEKMDGTEELLVKLNREDLLRKQRTFDNGSIPHQIHLGELHAILRRQEDFYPFL
KDNREKIEKILTFRIPYYVGPLARGNSRFAWMTRKSEETITPWNFEEVVDKGASAQSFI
ERMTNFDKNLPNEKVLPKHSLLYEYFTVYNELTKVKYVTEGMRKPAFLSGEQKKAIVDL
LFKTNRKVTVKQLKEDYFKKIECFDSVEISGVEDRFNASLGTYHDLLKIIKDKDFLDNE
ENEDILEDIVLTLTLFEDREMIEERLKTYAHLFDDKVMKQLKRRRYTGWGRLSRKLING
IRDKQSGKTILDFLKSDGFANRNFMQLIHDDSLTFKEDIQKAQVSGQGDSLHEHIANLA
GSPAIKKGILQTVKVVDELVKVMGRHKPENIVIEMARENQTTQKGQKNSRERMKRIEEG
IKELGSQILKEHPVENTQLQNEKLYLYYLQNGRDMYVDQELDINRLSDYDVDHIVPQSF
LKDDSIDNKVLTRSDKNRGKSDNVPSEEVVKKMKNYWRQLLNAKLITQRKFDNLTKAER
GGLSELDKAGFIKRQLVETRQITKHVAQILDSRMNTKYDENDKLIREVKVITLKSKLVS
DFRKDFQFYKVREINNYHHAHDAYLNAVVGTALIKKYPKLESEFVYGDYKVYDVRKMIA
KSEQEIGKATAKYFFYSNIMNFFKTEITLANGEIRKRPLIETNGETGEIVWDKGRDFAT
VRKVLSMPQVNIVKKTEVQTGGFSKESILPKRNSDKLIARKKDWDPKKYGGFDSPTVAY
SVLVVAKVEKGKSKKLKSVKELLGITIMERSSFEKNPIDFLEAKGYKEVKKDLIIKLPK
YSLFELENGRKRMLASAGELQKGNELALPSKYVNFLYLASHYEKLKGSPEDNEQKQLFV
EQHKHYLDEIIEQISEFSKRVILADANLDKVLSAYNKHRDKPIREQAENIIHLFTLTNL
GAPAAFKYFDTTIDRKRYTSTKEVLDATLIHQSITGLYETRIDLSQLGGDSGGSKRTAD
GSEFEPKKKRKVGSGATNFSLLKQAGDVEENPGPMVSKGEELFTGVVPILVELDGDVNG
HKFSVSGEGEGDATYGKLTLKFICTTGKLPVPWPTLVTTLTYGVQCFSRYPDHMKQHDF
FKSAMPEGYVQERTIFFKDDGNYKTRAEVKFEGDTLVNRIELKGIDFKEDGNILGHKLE
YNYNSHNVYIMADKQKNGIKVNFKIRHNIEDGSVQLADHYQQNTPIGDGPVLLPDNHYL
STQSALSKDPNEKRDHMVLLEFVTAAGITLGMDELYKSGGSPKKKRKV
ABEmax containing newer ABE8 TadA* variants
(see below), SEQ ID NO: 409
MKRTADGSEFESPKKKRKVSEVEFSHEYWMRHALTLAKRAWDEREVPVGAVLVHNNRVI
GEGWNRPIGRHDPTAHAEIMALRQGGLVMQNYRLIDATLYVTLEPCVMCAGAMIHSRIG
RVVFGARDAKTGAAGSLMDVLHHPGMNHRVEITEGILADECAALLSDFFRMRRQEIKAQ
KKAQSSTDSGGSSGGSSGSETPGTSESATPESSGGSSGGS[TadA* ABE8e or
other ABE8 sequences as indicated below]SGGSSGGSSGSETPGTSES
ATPESSGGSSGGSDKKYSIGLAIGTNSVGWAVITDEYKVPSKKFKVLGNTDRHSIKKNL
IGALLFDSGETAEATRLKRTARRRYTRRKNRICYLQEIFSNEMAKVDDSFFHRLEESFL
VEEDKKHERHPIFGNIVDEVAYHEKYPTIYHLRKKLVDSTDKADLRLIYLALAHMIKFR
GHFLIEGDLNPDNSDVDKLFIQLVQTYNQLFEENPINASGVDAKAILSARLSKSRRLEN
LIAQLPGEKKNGLFGNLIALSLGLTPNFKSNFDLAEDAKLQLSKDTYDDDLDNLLAQIG
DQYADLFLAAKNLSDAILLSDILRVNTEITKAPLSASMIKRYDEHHQDLTLLKALVRQQ
LPEKYKEIFFDQSKNGYAGYIDGGASQEEFYKFIKPILEKMDGTEELLVKLNREDLLRK
QRTFDNGSIPHQIHLGELHAILRRQEDFYPFLKDNREKIEKILTFRIPYYVGPLARGNS
RFAWMTRKSEETITPWNFEEVVDKGASAQSFIERMTNFDKNLPNEKVLPKHSLLYEYFT
VYNELTKVKYVTEGMRKPAFLSGEQKKAIVDLLFKTNRKVTVKQLKEDYFKKIECFDSV
EISGVEDRFNASLGTYHDLLKIIKDKDFLDNEENEDILEDIVLTLTLFEDREMIEERLK
TYAHLFDDKVMKQLKRRRYTGWGRLSRKLINGIRDKQSGKTILDFLKSDGFANRNFMQL
IHDDSLTFKEDIQKAQVSGQGDSLHEHIANLAGSPAIKKGILQTVKVVDELVKVMGRHK
PENIVIEMARENQTTQKGQKNSRERMKRIEEGIKELGSQILKEHPVENTQLQNEKLYLY
YLQNGRDMYVDQELDINRLSDYDVDHIVPQSFLKDDSIDNKVLTRSDKNRGKSDNVPSE
EVVKKMKNYWRQLLNAKLITQRKFDNLTKAERGGLSELDKAGFIKRQLVETRQITKHVA
QILDSRMNTKYDENDKLIREVKVITLKSKLVSDFRKDFQFYKVREINNYHHAHDAYLNA
VVGTALIKKYPKLESEFVYGDYKVYDVRKMIAKSEQEIGKATAKYFFYSNIMNFFKTEI
TLANGEIRKRPLIETNGETGEIVWDKGRDFATVRKVLSMPQVNIVKKTEVQTGGFSKES
ILPKRNSDKLIARKKDWDPKKYGGFDSPTVAYSVLVVAKVEKGKSKKLKSVKELLGITI
MERSSFEKNPIDFLEAKGYKEVKKDLIIKLPKYSLFELENGRKRMLASAGELQKGNELA
LPSKYVNFLYLASHYEKLKGSPEDNEQKQLFVEQHKHYLDEIIEQISEFSKRVILADAN
LDKVLSAYNKHRDKPIREQAENIIHLFTLTNLGAPAAFKYFDTTIDRKRYTSTKEVLDA
TLIHQSITGLYETRIDLSQLGGDSGGSKRTADGSEFEPKKKRKV
miniABEmax containing newer ABE8 TadA* variants
(see below), SEQ ID NO: 410
MKRTADGSEFESPKKKRKV[TadA* ABE8e or other ABE8 sequences as
indicated below]SGGSSGGSSGSETPGTSESATPESSGGSSGGSDKKYSIGLAIG
TNSVGWAVITDEYKVPSKKFKVLGNTDRHSIKKNLIGALLFDSGETAEATRLKRTARRR
YTRRKNRICYLQEIFSNEMAKVDDSFFHRLEESFLVEEDKKHERHPIFGNIVDEVAYHE
KYPTIYHLRKKLVDSTDKADLRLIYLALAHMIKFRGHFLIEGDLNPDNSDVDKLFIQLV
QTYNQLFEENPINASGVDAKAILSARLSKSRRLENLIAQLPGEKKNGLFGNLIALSLGL
TPNFKSNFDLAEDAKLQLSKDTYDDDLDNLLAQIGDQYADLFLAAKNLSDAILLSDILR
VNTEITKAPLSASMIKRYDEHHQDLTLLKALVRQQLPEKYKEIFFDQSKNGYAGYIDGG
ASQEEFYKFIKPILEKMDGTEELLVKLNREDLLRKQRTFDNGSIPHQIHLGELHAILRR
QEDFYPFLKDNREKIEKILTFRIPYYVGPLARGNSRFAWMTRKSEETITPWNFEEVVDK
GASAQSFIERMTNFDKNLPNEKVLPKHSLLYEYFTVYNELTKVKYVTEGMRKPAFLSGE
QKKAIVDLLFKTNRKVTVKQLKEDYFKKIECFDSVEISGVEDRFNASLGTYHDLLKIIK
DKDFLDNEENEDILEDIVLTLTLFEDREMIEERLKTYAHLFDDKVMKQLKRRRYTGWGR
LSRKLINGIRDKQSGKTILDFLKSDGFANRNFMQLIHDDSLTFKEDIQKAQVSGQGDSL
HEHIANLAGSPAIKKGILQTVKVVDELVKVMGRHKPENIVIEMARENQTTQKGQKNSRE
RMKRIEEGIKELGSQILKEHPVENTQLQNEKLYLYYLQNGRDMYVDQELDINRLSDYDV
DHIVPQSFLKDDSIDNKVLTRSDKNRGKSDNVPSEEVVKKMKNYWRQLLNAKLITQRKF
DNLTKAERGGLSELDKAGFIKRQLVETRQITKHVAQILDSRMNTKYDENDKLIREVKVI
TLKSKLVSDFRKDFQFYKVREINNYHHAHDAYLNAVVGTALIKKYPKLESEFVYGDYKV
YDVRKMIAKSEQEIGKATAKYFFYSNIMNFFKTEITLANGEIRKRPLIETNGETGEIVW
DKGRDFATVRKVLSMPQVNIVKKTEVQTGGFSKESILPKRNSDKLIARKKDWDPKKYGG
FDSPTVAYSVLVVAKVEKGKSKKLKSVKELLGITIMERSSFEKNPIDFLEAKGYKEVKK
DLIIKLPKYSLFELENGRKRMLASAGELQKGNELALPSKYVNFLYLASHYEKLKGSPED
NEQKQLFVEQHKHYLDEIIEQISEFSKRVILADANLDKVLSAYNKHRDKPIREQAENII
HLFTLTNLGAPAAFKYFDTTIDRKRYTSTKEVLDATLIHQSITGLYETRIDLSQLGGDS
GGSKRTADGSEFEPKKKRKV
TadA* (ABE8e), SEQ ID NO: 411
SEVEFSHEYWMRHALTLAKRARDEREVPVGAVLVLNNRVIGEGWNRAIGLHDPTAHAEI
MALRQGGLVMQNYRLIDATLYVTFEPCVMCAGAMIHSRIGRVVFGVRNSKRGAAGSLMN
VLNYPGMNHRVEITEGILADECAALLCDFYRMPRQVFNAQKKAQSSIN
TadA* (ABE8e_V82G), SEQ ID NO: 412
SEVEFSHEYWMRHALTLAKRARDEREVPVGAVLVLNNRVIGEGWNRAIGLHDPTAHAEI
MALRQGGLVMQNYRLIDATLYGTFEPCVMCAGAMIHSRIGRVVFGVRNSKRGAAGSLMN
VLNYPGMNHRVEITEGILADECAALLCDFYRMPRQVFNAQKKAQSSIN
TadA* (ABE8e_K20A/R21A), SEQ ID NO: 413
SEVEFSHEYWMRHALTLAAAARDEREVPVGAVLVLNNRVIGEGWNRAIGLHDPTAHAEI
MALRQGGLVMQNYRLIDATLYVTFEPCVMCAGAMIHSRIGRVVFGVRNSKRGAAGSLMN
VLNYPGMNHRVEITEGILADECAALLCDFYRMPRQVFNAQKKAQSSIN
TadA* (ABE8.8), SEQ ID NO: 414
SEVEFSHEYWMRHALTLAKRARDEREVPVGAVLVLNNRVIGEGWNRAIGLHDPTAHAEI
MALRQGGLVMQNYRLIDATLYVTFEPCVMCAGAMIHSRIGRVVFGVRNAKTGAAGSLMD
VLHHPGMNHRVEITEGILADECAALLCRFFRMPRRVFNAQKKAQSSTD
TadA* (ABE8.13), SEQ ID NO: 415
SEVEFSHEYWMRHALTLAKRARDEREVPVGAVLVLNNRVIGEGWNRAIGLHDPTAHAEI
MALRQGGLVMQNYRLYDATLYVTFEPCVMCAGAMIHSRIGRVVFGVRNAKTGAAGSLMD
VLHHPGMNHRVEITEGILADECAALLCRFFRMPRRVFNAQKKAQSSTD
TadA* (ABE8.17), SEQ ID NO: 416
SEVEFSHEYWMRHALTLAKRARDEREVPVGAVLVLNNRVIGEGWNRAIGLHDPTAHAEI
MALRQGGLVMQNYRLIDATLYSTFEPCVMCAGAMIHSRIGRVVFGVRNAKTGAAGSLMD
VLHYPGMNHRVEITEGILADECAALLCYFFRMPRRVFNAQKKAQSSTD
TadA* (ABE8.20), SEQ ID NO: 417
SEVEFSHEYWMRHALTLAKRARDEREVPVGAVLVLNNRVIGEGWNRAIGLHDPTAHAEI
MALRQGGLVMQNYRLYDATLYSTFEPCVMCAGAMIHSRIGRVVFGVRNAKTGAAGSLMD
VLHHPGMNHRVEITEGILADECAALLCRFFRMPRRVFNAQKKAQSSTD
SPACE (dual-deaminase base editor), SEQ ID NO: 418
MKRTADGSEFESPKKKRKVSEVEFSHEYWMRHALTLAKRARDEREVPVGAVLVLNNRVI
GEGWNRAIGLHDPTAHAEIMALRQGGLVMQNYRLIDATLYGTFEPCVMCAGAMIHSRIG
RVVFGVRNAKTGAAGSLMDVLHYPGMNHRVEITEGILADECAALLCYFFRMPRQVFNAQ
KKAQSSTDSGGSSGGSSGSETPGTSESATPESSGGSSGGSDKKYSIGLAIGTNSVGWAV
ITDEYKVPSKKFKVLGNTDRHSIKKNLIGALLFDSGETAEATRLKRTARRRYTRRKNRI
CYLQEIFSNEMAKVDDSFFHRLEESFLVEEDKKHERHPIFGNIVDEVAYHEKYPTIYHL
RKKLVDSTDKADLRLIYLALAHMIKFRGHFLIEGDLNPDNSDVDKLFIQLVQTYNQLFE
ENPINASGVDAKAILSARLSKSRRLENLIAQLPGEKKNGLFGNLIALSLGLTPNFKSNF
DLAEDAKLQLSKDTYDDDLDNLLAQIGDQYADLFLAAKNLSDAILLSDILRVNTEITKA
PLSASMIKRYDEHHQDLTLLKALVRQQLPEKYKEIFFDQSKNGYAGYIDGGASQEEFYK
FIKPILEKMDGTEELLVKLNREDLLRKQRTFDNGSIPHQIHLGELHAILRRQEDFYPFL
KDNREKIEKILTFRIPYYVGPLARGNSRFAWMTRKSEETITPWNFEEVVDKGASAQSFI
ERMTNFDKNLPNEKVLPKHSLLYEYFTVYNELTKVKYVTEGMRKPAFLSGEQKKAIVDL
LFKTNRKVTVKQLKEDYFKKIECFDSVEISGVEDRFNASLGTYHDLLKIIKDKDFLDNE
ENEDILEDIVLTLTLFEDREMIEERLKTYAHLFDDKVMKQLKRRRYTGWGRLSRKLING
IRDKQSGKTILDFLKSDGFANRNFMQLIHDDSLTFKEDIQKAQVSGQGDSLHEHIANLA
GSPAIKKGILQTVKVVDELVKVMGRHKPENIVIEMARENQTTQKGQKNSRERMKRIEEG
IKELGSQILKEHPVENTQLQNEKLYLYYLQNGRDMYVDQELDINRLSDYDVDHIVPQSF
LKDDSIDNKVLTRSDKNRGKSDNVPSEEVVKKMKNYWRQLLNAKLITQRKFDNLTKAER
GGLSELDKAGFIKRQLVETRQITKHVAQILDSRMNTKYDENDKLIREVKVITLKSKLVS
DFRKDFQFYKVREINNYHHAHDAYLNAVVGTALIKKYPKLESEFVYGDYKVYDVRKMIA
KSEQEIGKATAKYFFYSNIMNFFKTEITLANGEIRKRPLIETNGETGEIVWDKGRDFAT
VRKVLSMPQVNIVKKTEVQTGGFSKESILPKRNSDKLIARKKDWDPKKYGGFDSPTVAY
SVLVVAKVEKGKSKKLKSVKELLGITIMERSSFEKNPIDFLEAKGYKEVKKDLIIKLPK
YSLFELENGRKRMLASAGELQKGNELALPSKYVNFLYLASHYEKLKGSPEDNEQKQLFV
EQHKHYLDEIIEQISEFSKRVILADANLDKVLSAYNKHRDKPIREQAENIIHLFTLTNL
GAPAAFKYFDTTIDRKRYTSTKEVLDATLIHQSITGLYETRIDLSQLGGDSGGSKRTAD
GSEFEPKKKRKVSGGSSGGSSGSETPGTSESATPESSGGSSGGSTDAEYVRIHEKLDIY
TFKKQFFNNKKSVSHRCYVLFELKRRGERRACFWGYAVNKPQSGTERGIHAEIFSIRKV
EEYLRDNPGQFTINWYSSWSPCADCAEKILEWYNQELRGNGHTLKIWACKLYYEKNARN
QIGLWNLRDNGVGLNVMVSEHYQCCRKIFIQSSHNQLNENRWLEKTLKRAEKWRSELSI
MIQVKILHTTKSPAVSGGSGGSGGSTNLSDIIEKETGKQLVIQESILMLPEEVEEVIGN
KPESDILVHTAYDESTDENVMLLTSDAPEYKPWALVIQDSNGENKIKMLSGGSGGSGGS
TNLSDIIEKETGKQLVIQESILMLPEEVEEVIGNKPESDILVHTAYDESTDENVMLLTS
DAPEYKPWALVIQDSNGENKIKMLGSGATNFSLLKQAGDVEENPGPMVSKGEELFTGVV
PILVELDGDVNGHKFSVSGEGEGDATYGKLTLKFICTTGKLPVPWPTLVTTLTYGVQCF
SRYPDHMKQHDFFKSAMPEGYVQERTIFFKDDGNYKTRAEVKFEGDTLVNRIELKGIDF
KEDGNILGHKLEYNYNSHNVYIMADKQKNGIKVNFKIRHNIEDGSVQLADHYQQNTPIG
DGPVLLPDNHYLSTQSALSKDPNEKRDHMVLLEFVTAAGITLGMDELYKSGGSPKKKRK
SPACE-ΔUGI (SPACE without UGI fusion), SEQ
ID NO: 419
MKRTADGSEFESPKKKRKVSEVEFSHEYWMRHALTLAKRARDEREVPVGAVLVLNNRVI
GEGWNRAIGLHDPTAHAEIMALRQGGLVMQNYRLIDATLYGTFEPCVMCAGAMIHSRIG
RVVFGVRNAKTGAAGSLMDVLHYPGMNHRVEITEGILADECAALLCYFFRMPRQVFNAQ
KKAQSSTDSGGSSGGSSGSETPGTSESATPESSGGSSGGSDKKYSIGLAIGTNSVGWAV
ITDEYKVPSKKFKVLGNTDRHSIKKNLIGALLFDSGETAEATRLKRTARRRYTRRKNRI
CYLQEIFSNEMAKVDDSFFHRLEESFLVEEDKKHERHPIFGNIVDEVAYHEKYPTIYHL
RKKLVDSTDKADLRLIYLALAHMIKFRGHFLIEGDLNPDNSDVDKLFIQLVQTYNQLFE
ENPINASGVDAKAILSARLSKSRRLENLIAQLPGEKKNGLFGNLIALSLGLTPNFKSNF
DLAEDAKLQLSKDTYDDDLDNLLAQIGDQYADLFLAAKNLSDAILLSDILRVNTEITKA
PLSASMIKRYDEHHQDLTLLKALVRQQLPEKYKEIFFDQSKNGYAGYIDGGASQEEFYK
FIKPILEKMDGTEELLVKLNREDLLRKQRTFDNGSIPHQIHLGELHAILRRQEDFYPFL
KDNREKIEKILTFRIPYYVGPLARGNSRFAWMTRKSEETITPWNFEEVVDKGASAQSFI
ERMTNFDKNLPNEKVLPKHSLLYEYFTVYNELTKVKYVTEGMRKPAFLSGEQKKAIVDL
LFKTNRKVTVKQLKEDYFKKIECFDSVEISGVEDRFNASLGTYHDLLKIIKDKDFLDNE
ENEDILEDIVLTLTLFEDREMIEERLKTYAHLFDDKVMKQLKRRRYTGWGRLSRKLING
IRDKQSGKTILDFLKSDGFANRNFMQLIHDDSLTFKEDIQKAQVSGQGDSLHEHIANLA
GSPAIKKGILQTVKVVDELVKVMGRHKPENIVIEMARENQTTQKGQKNSRERMKRIEEG
IKELGSQILKEHPVENTQLQNEKLYLYYLQNGRDMYVDQELDINRLSDYDVDHIVPQSF
LKDDSIDNKVLTRSDKNRGKSDNVPSEEVVKKMKNYWRQLLNAKLITQRKFDNLTKAER
GGLSELDKAGFIKRQLVETRQITKHVAQILDSRMNTKYDENDKLIREVKVITLKSKLVS
DFRKDFQFYKVREINNYHHAHDAYLNAVVGTALIKKYPKLESEFVYGDYKVYDVRKMIA
KSEQEIGKATAKYFFYSNIMNFFKTEITLANGEIRKRPLIETNGETGEIVWDKGRDFAT
VRKVLSMPQVNIVKKTEVQTGGFSKESILPKRNSDKLIARKKDWDPKKYGGFDSPTVAY
SVLVVAKVEKGKSKKLKSVKELLGITIMERSSFEKNPIDFLEAKGYKEVKKDLIIKLPK
YSLFELENGRKRMLASAGELQKGNELALPSKYVNFLYLASHYEKLKGSPEDNEQKQLFV
EQHKHYLDEIIEQISEFSKRVILADANLDKVLSAYNKHRDKPIREQAENIIHLFTLTNL
GAPAAFKYFDTTIDRKRYTSTKEVLDATLIHQSITGLYETRIDLSQLGGDSGGSKRTAD
GSEFEPKKKRKVSGGSSGGSSGSETPGTSESATPESSGGSSGGSTDAEYVRIHEKLDIY
TFKKQFFNNKKSVSHRCYVLFELKRRGERRACFWGYAVNKPQSGTERGIHAEIFSIRKV
EEYLRDNPGQFTINWYSSWSPCADCAEKILEWYNQELRGNGHTLKIWACKLYYEKNARN
QIGLWNLRDNGVGLNVMVSEHYQCCRKIFIQSSHNQLNENRWLEKTLKRAEKWRSELSI
MIQVKILHTTKSPAVGSGATNFSLLKQAGDVEENPGPMVSKGEELFTGVVPILVELDGD
VNGHKFSVSGEGEGDATYGKLTLKFICTTGKLPVPWPTLVTTLTYGVQCFSRYPDHMKQ
HDFFKSAMPEGYVQERTIFFKDDGNYKTRAEVKFEGDTLVNRIELKGIDFKEDGNILGH
KLEYNYNSHNVYIMADKQKNGIKVNFKIRHNIEDGSVQLADHYQQNTPIGDGPVLLPDN
HYLSTQSALSKDPNEKRDHMVLLEFVTAAGITLGMDELYKSGGSPKKKRKV
SPACE-NG, SEQ ID NO: 420
MKRTADGSEFESPKKKRKVSEVEFSHEYWMRHALTLAKRARDEREVPVGAVLVLNNRVI
GEGWNRAIGLHDPTAHAEIMALRQGGLVMQNYRLIDATLYGTFEPCVMCAGAMIHSRIG
RVVFGVRNAKTGAAGSLMDVLHYPGMNHRVEITEGILADECAALLCYFFRMPRQVFNAQ
KKAQSSTDSGGSSGGSSGSETPGTSESATPESSGGSSGGSDKKYSIGLAIGTNSVGWAV
ITDEYKVPSKKFKVLGNTDRHSIKKNLIGALLFDSGETAEATRLKRTARRRYTRRKNRI
CYLQEIFSNEMAKVDDSFFHRLEESFLVEEDKKHERHPIFGNIVDEVAYHEKYPTIYHL
RKKLVDSTDKADLRLIYLALAHMIKFRGHFLIEGDLNPDNSDVDKLFIQLVQTYNQLFE
ENPINASGVDAKAILSARLSKSRRLENLIAQLPGEKKNGLFGNLIALSLGLTPNFKSNF
DLAEDAKLQLSKDTYDDDLDNLLAQIGDQYADLFLAAKNLSDAILLSDILRVNTEITKA
PLSASMIKRYDEHHQDLTLLKALVRQQLPEKYKEIFFDQSKNGYAGYIDGGASQEEFYK
FIKPILEKMDGTEELLVKLNREDLLRKQRTFDNGSIPHQIHLGELHAILRRQEDFYPFL
KDNREKIEKILTFRIPYYVGPLARGNSRFAWMTRKSEETITPWNFEEVVDKGASAQSFI
ERMTNFDKNLPNEKVLPKHSLLYEYFTVYNELTKVKYVTEGMRKPAFLSGEQKKAIVDL
LFKTNRKVTVKQLKEDYFKKIECFDSVEISGVEDRFNASLGTYHDLLKIIKDKDFLDNE
ENEDILEDIVLTLTLFEDREMIEERLKTYAHLFDDKVMKQLKRRRYTGWGRLSRKLING
IRDKQSGKTILDFLKSDGFANRNFMQLIHDDSLTFKEDIQKAQVSGQGDSLHEHIANLA
GSPAIKKGILQTVKVVDELVKVMGRHKPENIVIEMARENQTTQKGQKNSRERMKRIEEG
IKELGSQILKEHPVENTQLQNEKLYLYYLQNGRDMYVDQELDINRLSDYDVDHIVPQSF
LKDDSIDNKVLTRSDKNRGKSDNVPSEEVVKKMKNYWRQLLNAKLITQRKFDNLTKAER
GGLSELDKAGFIKRQLVETRQITKHVAQILDSRMNTKYDENDKLIREVKVITLKSKLVS
DFRKDFQFYKVREINNYHHAHDAYLNAVVGTALIKKYPKLESEFVYGDYKVYDVRKMIA
KSEQEIGKATAKYFFYSNIMNFFKTEITLANGEIRKRPLIETNGETGEIVWDKGRDFAT
VRKVLSMPQVNIVKKTEVQTGGFSKESIRPKRNSDKLIARKKDWDPKKYGGFVSPTVAY
SVLVVAKVEKGKSKKLKSVKELLGITIMERSSFEKNPIDFLEAKGYKEVKKDLIIKLPK
YSLFELENGRKRMLASARFLQKGNELALPSKYVNFLYLASHYEKLKGSPEDNEQKQLFV
EQHKHYLDEIIEQISEFSKRVILADANLDKVLSAYNKHRDKPIREQAENIIHLFTLTNL
GAPRAFKYFDTTIDRKVYRSTKEVLDATLIHQSITGLYETRIDLSQLGGDSGGSKRTAD
GSEFEPKKKRKVSGGSSGGSSGSETPGTSESATPESSGGSSGGSTDAEYVRIHEKLDIY
TFKKQFFNNKKSVSHRCYVLFELKRRGERRACFWGYAVNKPQSGTERGIHAEIFSIRKV
EEYLRDNPGQFTINWYSSWSPCADCAEKILEWYNQELRGNGHTLKIWACKLYYEKNARN
QIGLWNLRDNGVGLNVMVSEHYQCCRKIFIQSSHNQLNENRWLEKTLKRAEKWRSELSI
MIQVKILHTTKSPAVSGGSGGSGGSTNLSDIIEKETGKQLVIQESILMLPEEVEEVIGN
KPESDILVHTAYDESTDENVMLLTSDAPEYKPWALVIQDSNGENKIKMLSGGSGGSGGS
TNLSDIIEKETGKQLVIQESILMLPEEVEEVIGNKPESDILVHTAYDESTDENVMLLTS
DAPEYKPWALVIQDSNGENKIKMLGSGATNFSLLKQAGDVEENPGPMVSKGEELFTGVV
PILVELDGDVNGHKFsVSGEGEGDATYGKLTLKFICTTGKLPVPWPTLVTTLTYGVQCF
SRYPDHMKQHDFFKSAMPEGYVQERTIFFKDDGNYKTRAEVKFEGDTLVNRIELKGIDF
KEDGNILGHKLEYNYNSHNVYIMADKQKNGIKVNFKIRHNIEDGSVQLADHYQQNTPIG
DGPVLLPDNHYLSTQSALSKDPNEKRDHMVLLEFVTAAGITLGMDELYKSGGSPKKKRK
V
SPACE-VRQR, SEQ ID NO: 421
MKRTADGSEFESPKKKRKVSEVEFSHEYWMRHALTLAKRARDEREVPVGAVLVLNNRVI
GEGWNRAIGLHDPTAHAEIMALRQGGLVMQNYRLIDATLYGTFEPCVMCAGAMIHSRIG
RVVFGVRNAKTGAAGSLMDVLHYPGMNHRVEITEGILADECAALLCYFFRMPRQVFNAQ
KKAQSSTDSGGSSGGSSGSETPGTSESATPESSGGSSGGSDKKYSIGLAIGTNSVGWAV
ITDEYKVPSKKFKVLGNTDRHSIKKNLIGALLFDSGETAEATRLKRTARRRYTRRKNRI
CYLQEIFSNEMAKVDDSFFHRLEESFLVEEDKKHERHPIFGNIVDEVAYHEKYPTIYHL
RKKLVDSTDKADLRLIYLALAHMIKFRGHFLIEGDLNPDNSDVDKLFIQLVQTYNQLFE
ENPINASGVDAKAILSARLSKSRRLENLIAQLPGEKKNGLFGNLIALSLGLTPNFKSNF
DLAEDAKLQLSKDTYDDDLDNLLAQIGDQYADLFLAAKNLSDAILLSDILRVNTEITKA
PLSASMIKRYDEHHQDLTLLKALVRQQLPEKYKEIFFDQSKNGYAGYIDGGASQEEFYK
FIKPILEKMDGTEELLVKLNREDLLRKQRTFDNGSIPHQIHLGELHAILRRQEDFYPFL
KDNREKIEKILTFRIPYYVGPLARGNSRFAWMTRKSEETITPWNFEEVVDKGASAQSFI
ERMTNFDKNLPNEKVLPKHSLLYEYFTVYNELTKVKYVTEGMRKPAFLSGEQKKAIVDL
LFKTNRKVTVKQLKEDYFKKIECFDSVEISGVEDRFNASLGTYHDLLKIIKDKDFLDNE
ENEDILEDIVLTLTLFEDREMIEERLKTYAHLFDDKVMKQLKRRRYTGWGRLSRKLING
IRDKQSGKTILDFLKSDGFANRNFMQLIHDDSLTFKEDIQKAQVSGQGDSLHEHIANLA
GSPAIKKGILQTVKVVDELVKVMGRHKPENIVIEMARENQTTQKGQKNSRERMKRIEEG
IKELGSQILKEHPVENTQLQNEKLYLYYLQNGRDMYVDQELDINRLSDYDVDHIVPQSF
LKDDSIDNKVLTRSDKNRGKSDNVPSEEVVKKMKNYWRQLLNAKLITQRKFDNLTKAER
GGLSELDKAGFIKRQLVETRQITKHVAQILDSRMNTKYDENDKLIREVKVITLKSKLVS
DFRKDFQFYKVREINNYHHAHDAYLNAVVGTALIKKYPKLESEFVYGDYKVYDVRKMIA
KSEQEIGKATAKYFFYSNIMNFFKTEITLANGEIRKRPLIETNGETGEIVWDKGRDFAT
VRKVLSMPQVNIVKKTEVQTGGFSKESILPKRNSDKLIARKKDWDPKKYGGFVSPTVAY
SVLVVAKVEKGKSKKLKSVKELLGITIMERSSFEKNPIDFLEAKGYKEVKKDLIIKLPK
YSLFELENGRKRMLASARELQKGNELALPSKYVNFLYLASHYEKLKGSPEDNEQKQLFV
EQHKHYLDEIIEQISEFSKRVILADANLDKVLSAYNKHRDKPIREQAENIIHLFTLTNL
GAPAAFKYFDTTIDRKQYRSTKEVLDATLIHQSITGLYETRIDLSQLGGDSGGSKRTAD
GSEFEPKKKRKVSGGSSGGSSGSETPGTSESATPESSGGSSGGSTDAEYVRIHEKLDIY
TFKKQFFNNKKSVSHRCYVLFELKRRGERRACFWGYAVNKPQSGTERGIHAEIFSIRKV
EEYLRDNPGQFTINWYSSWSPCADCAEKILEWYNQELRGNGHTLKIWACKLYYEKNARN
QIGLWNLRDNGVGLNVMVSEHYQCCRKIFIQSSHNQLNENRWLEKTLKRAEKWRSELSI
MIQVKILHTTKSPAVSGGSGGSGGSTNLSDIIEKETGKQLVIQESILMLPEEVEEVIGN
KPESDILVHTAYDESTDENVMLLTSDAPEYKPWALVIQDSNGENKIKMLSGGSGGSGGS
TNLSDIIEKETGKQLVIQESILMLPEEVEEVIGNKPESDILVHTAYDESTDENVMLLTS
DAPEYKPWALVIQDSNGENKIKMLGSGATNFSLLKQAGDVEENPGPMVSKGEELFTGVV
PILVELDGDVNGHKFsVSGEGEGDATYGKLTLKFICTTGKLPVPWPTLVTTLTYGVQCF
SRYPDHMKQHDFFKSAMPEGYVQERTIFFKDDGNYKTRAEVKFEGDTLVNRIELKGIDF
KEDGNILGHKLEYNYNSHNVYIMADKQKNGIKVNFKIRHNIEDGSVQLADHYQQNTPIG
DGPVLLPDNHYLSTQSALSKDPNEKRDHMVLLEFVTAAGITLGMDELYKSGGSPKKKRK
V
SPACE-NAA, SEQ ID NO: 422
MKRTADGSEFESPKKKRKVSEVEFSHEYWMRHALTLAKRARDEREVPVGAVLVLNNRVI
GEGWNRAIGLHDPTAHAEIMALRQGGLVMQNYRLIDATLYGTFEPCVMCAGAMIHSRIG
RVVFGVRNAKTGAAGSLMDVLHYPGMNHRVEITEGILADECAALLCYFFRMPRQVFNAQ
KKAQSSTDSGGSSGGSSGSETPGTSESATPESSGGSSGGSDKKYSIGLAIGTNSVGWAV
ITDEYKVPSKKFKVLGNTDRHSIKKNLIGALLFDSGETAEATRLKRTARRRYTRRKNRI
CYLQEIFSNEMAKVDDSFFHRLEESFLVEEDKKHERHPIFGNIVDEVAYHEKYPTIYHL
RKKLVDSTDKADLRLIYLALAHMIKFRGHFLIEGDLNPDNSDVDKLFIQLVQTYNQLFE
ENPINASGVDAKAILSARLSKSRRLENLIAQLPGEKKNGLFGNLIALSLGLTPNFKSNF
DLAEDAKLQLSKDTYDDDLDNLLAQIGDQYADLFLAAKNLSDAILLSDILRVNTEITKA
PLSASMIKRYDEHHQDLTLLKALVRQQLPEKYKEIFFDQSKNGYAGYIDGGASQEEFYK
FIKPILEKMDGTEELLVKLNREDLLRKQRTFDNGSIPHQIHLGELHAILRRQEDFYPFL
KDNREKIEKILTFRIPYYVGPLARGNSRFAWMTRKSEETITPWNFEEVVDKGASAQSFI
ERMTNFDKNLPNEKVLPKHSLLYEYFTVYNELTKVKYVTEGMRKPAFLSGEQKKAIVDL
LFKTNRKVTVKQLKEDYFKKIECFDSVEISGVEDRFNASLGTYHDLLKIIKDKDFLDNE
ENEDILEDIVLTLTLFEDREMIEERLKTYAHLFDDKVMKQLKRRRYTGWGRLSRKLING
IRDKQSGKTILDFLKSDGFANRNFMQLIHDDSLTFKEDIQKAQVSGQGDSLHEHIANLA
GSPAIKKGILQTVKVVDELVKVMGRHKPENIVIEMARENQTTQKGQKNSRERMKRIEEG
IKELGSQILKEHPVENTQLQNEKLYLYYLQNGRDMYVDQELDINRLSDYDVDHIVPQSF
LKDDSIDNKVLTRSDKNRGKSDNVPSEEVVKKMKNYWRQLLNAKLITQRKFDNLTKAER
GGLSELDKAGFIKRQLVETRQITKHVAQILDSRMNTKYDENDKLIREVKVITLKSKLVS
DFRKDFQFYKVREINNYHHAHDAYLNAVVGTALIKKYPKLESEFVYGDYKVYDVRKMIA
KSEQEIGKATAKYFFYSNIMNFFKTEITLANGEIRKRPLIETNGETGEIVWDKGRDFAT
VRKVLSMPQVNIVKKTEIQTVGQNGGLFDDNPKSPLEVTPSKLVPLKKELNPKKYGGYQ
KPTTAYPVLLITDTKQLIPISVMNKKQFEQNPVKFLRDRGYQQVGKNDFIKLPKYTLVD
IGDGIKRLWASSKEIHKGNQLVVSKKSQILLYHAHHLDSDLSNDYLQNHNQQFDVLFNE
IISFSKKCKLGKEHIQKIENVYSNKKNSASIEELAESFIKLLGFTQLGATSPFNFLGVK
LNQKQYKGKKDYILPCTEGTLIRQSITGLYETRVDLSKIGEDSGGSKRTADGSEFEPKK
KRKVSGGSSGGSSGSETPGTSESATPESSGGSSGGSTDAEYVRIHEKLDIYTFKKQFFN
NKKSVSHRCYVLFELKRRGERRACFWGYAVNKPQSGTERGIHAEIFSIRKVEEYLRDNP
GQFTINWYSSWSPCADCAEKILEWYNQELRGNGHTLKIWACKLYYEKNARNQIGLWNLR
DNGVGLNVMVSEHYQCCRKIFIQSSHNQLNENRWLEKTLKRAEKWRSELSIMIQVKILH
TTKSPAVSGGSGGSGGSTNLSDIIEKETGKQLVIQESILMLPEEVEEVIGNKPESDILV
HTAYDESTDENVMLLTSDAPEYKPWALVIQDSNGENKIKMLSGGSGGSGGSTNLSDIIE
KETGKQLVIQESILMLPEEVEEVIGNKPESDILVHTAYDESTDENVMLLTSDAPEYKPW
ALVIQDSNGENKIKMLGSGATNFSLLKQAGDVEENPGPMVSKGEELFTGVVPILVELDG
DVNGHKFSVSGEGEGDATYGKLTLKFICTTGKLPVPWPTLVTTLTYGVQCFSRYPDHMK
QHDFFKSAMPEGYVQERTIFFKDDGNYKTRAEVKFEGDTLVNRIELKGIDFKEDGNILG
HKLEYNYNSHNVYIMADKQKNGIKVNFKIRHNIEDGSVQLADHYQQNTPIGDGPVLLPD
NHYLSTQSALSKDPNEKRDHMVLLEFVTAAGITLGMDELYKSGGSPKKKRKV
BE4max(R33A)-ΔUGI-eUNG, SEQ ID NO: 423
MKRTADGSEFESPKKKRKVSSETGPVAVDPTLRRRIEPHEFEVFFDPRELAKETCLLYE
INWGGRHSIWRHTSQNTNKHVEVNFIEKFTTERYFCPNTRCSITWFLSWSPCGECSRAI
TEFLSRYPHVTLFIYIARLYHHADPRNRQGLRDLISSGVTIQIMTEQESGYCWRNFVNY
SPSNEAHWPRYPHLWVRLYVLELYCIILGLPPCLNILRRKQPQLTFFTIALQSCHYQRL
PPHILWATGLKSGGSSGGSSGSETPGTSESATPESSGGSSGGSDKKYSIGLAIGTNSVG
WAVITDEYKVPSKKFKVLGNTDRHSIKKNLIGALLFDSGETAEATRLKRTARRRYTRRK
NRICYLQEIFSNEMAKVDDSFFHRLEESFLVEEDKKHERHPIFGNIVDEVAYHEKYPTI
YHLRKKLVDSTDKADLRLIYLALAHMIKFRGHFLIEGDLNPDNSDVDKLFIQLVQTYNQ
LFEENPINASGVDAKAILSARLSKSRRLENLIAQLPGEKKNGLFGNLIALSLGLTPNFK
SNFDLAEDAKLQLSKDTYDDDLDNLLAQIGDQYADLFLAAKNLSDAILLSDILRVNTEI
TKAPLSASMIKRYDEHHQDLTLLKALVRQQLPEKYKEIFFDQSKNGYAGYIDGGASQEE
FYKFIKPILEKMDGTEELLVKLNREDLLRKQRTFDNGSIPHQIHLGELHAILRRQEDFY
PFLKDNREKIEKILTFRIPYYVGPLARGNSRFAWMTRKSEETITPWNFEEVVDKGASAQ
SFIERMTNFDKNLPNEKVLPKHSLLYEYFTVYNELTKVKYVTEGMRKPAFLSGEQKKAI
VDLLFKTNRKVTVKQLKEDYFKKIECFDSVEISGVEDRFNASLGTYHDLLKIIKDKDFL
DNEENEDILEDIVLTLTLFEDREMIEERLKTYAHLFDDKVMKQLKRRRYTGWGRLSRKL
INGIRDKQSGKTILDFLKSDGFANRNFMQLIHDDSLTFKEDIQKAQVSGQGDSLHEHIA
NLAGSPAIKKGILQTVKVVDELVKVMGRHKPENIVIEMARENQTTQKGQKNSRERMKRI
EEGIKELGSQILKEHPVENTQLQNEKLYLYYLQNGRDMYVDQELDINRLSDYDVDHIVP
QSFLKDDSIDNKVLTRSDKNRGKSDNVPSEEVVKKMKNYWRQLLNAKLITQRKFDNLTK
AERGGLSELDKAGFIKRQLVETRQITKHVAQILDSRMNTKYDENDKLIREVKVITLKSK
LVSDFRKDFQFYKVREINNYHHAHDAYLNAVVGTALIKKYPKLESEFVYGDYKVYDVRK
MIAKSEQEIGKATAKYFFYSNIMNFFKTEITLANGEIRKRPLIETNGETGEIVWDKGRD
FATVRKVLSMPQVNIVKKTEVQTGGFSKESILPKRNSDKLIARKKDWDPKKYGGFDSPT
VAYSVLVVAKVEKGKSKKLKSVKELLGITIMERSSFEKNPIDFLEAKGYKEVKKDLIIK
LPKYSLFELENGRKRMLASAGELQKGNELALPSKYVNFLYLASHYEKLKGSPEDNEQKQ
LFVEQHKHYLDEIIEQISEFSKRVILADANLDKVLSAYNKHRDKPIREQAENIIHLFTL
TNLGAPAAFKYFDTTIDRKRYTSTKEVLDATLIHQSITGLYETRIDLSQLGGDSGGSGG
SGGSANELTWHDVLAEEKQQPYFLNTLQTVASERQSGVTIYPPQKDVFNAFRFTELGDV
KVVILGQDPYHGPGQAHGLAFSVRPGIAIPPSLLNMYKELENTIPGFTRPNHGYLESWA
RQGVLLLNTVLTVRAGQAHSHASLGWETFTDKVISLINQHREGVVFLLWGSHAQKKGAI
IDKQRHHVLKAPHPSPLSAHRGFFGCNHFVLANQWLEQRGETPIDWMPVLPAESESGGS
KRTADGSEFEPKKKRKVGGGGSGATNFSLLKQAGDVEENPGPMVSKGEELFTGVVPILV
ELDGDVNGHKFSVSGEGEGDATYGKLTLKFICTTGKLPVPWPTLVTTLTYGVQCFSRYP
DHMKQHDFFKSAMPEGYVQERTIFFKDDGNYKTRAEVKFEGDTLVNRIELKGIDFKEDG
NILGHKLEYNYNSHNVYIMADKQKNGIKVNFKIRHNIEDGSVQLADHYQQNTPIGDGPV
LLPDNHYLSTQSALSKDPNEKRDHMVLLEFVTAAGITLGMDELYK
eUNG-BE4max(R33A)-ΔUGI = CGBE1, SEQ ID NO: 424
MKRTADGSEFESPKKKRKVANELTWHDVLAEEKQQPYFLNTLQTVASERQSGVTIYPPQ
KDVFNAFRFTELGDVKVVILGQDPYHGPGQAHGLAFSVRPGIAIPPSLLNMYKELENTI
PGFTRPNHGYLESWARQGVLLLNTVLTVRAGQAHSHASLGWETFTDKVISLINQHREGV
VFLLWGSHAQKKGAIIDKQRHHVLKAPHPSPLSAHRGFFGCNHFVLANQWLEQRGETPI
DWMPVLPAESESGGSGGSGGSSSETGPVAVDPTLRRRIEPHEFEVFFDPRELAKETCLL
YEINWGGRHSIWRHTSQNTNKHVEVNFIEKFTTERYFCPNTRCSITWFLSWSPCGECSR
AITEFLSRYPHVTLFIYIARLYHHADPRNRQGLRDLISSGVTIQIMTEQESGYCWRNFV
NYSPSNEAHWPRYPHLWVRLYVLELYCIILGLPPCLNILRRKQPQLTFFTIALQSCHYQ
RLPPHILWATGLKSGGSSGGSSGSETPGTSESATPESSGGSSGGSDKKYSIGLAIGTNS
VGWAVITDEYKVPSKKFKVLGNTDRHSIKKNLIGALLFDSGETAEATRLKRTARRRYTR
RKNRICYLQEIFSNEMAKVDDSFFHRLEESFLVEEDKKHERHPIFGNIVDEVAYHEKYP
TIYHLRKKLVDSTDKADLRLIYLALAHMIKFRGHFLIEGDLNPDNSDVDKLFIQLVQTY
NQLFEENPINASGVDAKAILSARLSKSRRLENLIAQLPGEKKNGLFGNLIALSLGLTPN
FKSNFDLAEDAKLQLSKDTYDDDLDNLLAQIGDQYADLFLAAKNLSDAILLSDILRVNT
EITKAPLSASMIKRYDEHHQDLTLLKALVRQQLPEKYKEIFFDQSKNGYAGYIDGGASQ
EEFYKFIKPILEKMDGTEELLVKLNREDLLRKQRTFDNGSIPHQIHLGELHAILRRQED
FYPFLKDNREKIEKILTFRIPYYVGPLARGNSRFAWMTRKSEETITPWNFEEVVDKGAS
AQSFIERMTNFDKNLPNEKVLPKHSLLYEYFTVYNELTKVKYVTEGMRKPAFLSGEQKK
AIVDLLFKTNRKVTVKQLKEDYFKKIECFDSVEISGVEDRFNASLGTYHDLLKIIKDKD
FLDNEENEDILEDIVLTLTLFEDREMIEERLKTYAHLFDDKVMKQLKRRRYTGWGRLSR
KLINGIRDKQSGKTILDFLKSDGFANRNFMQLIHDDSLTFKEDIQKAQVSGQGDSLHEH
IANLAGSPAIKKGILQTVKVVDELVKVMGRHKPENIVIEMARENQTTQKGQKNSRERMK
RIEEGIKELGSQILKEHPVENTQLQNEKLYLYYLQNGRDMYVDQELDINRLSDYDVDHI
VPQSFLKDDSIDNKVLTRSDKNRGKSDNVPSEEVVKKMKNYWRQLLNAKLITQRKFDNL
TKAERGGLSELDKAGFIKRQLVETRQITKHVAQILDSRMNTKYDENDKLIREVKVITLK
SKLVSDFRKDFQFYKVREINNYHHAHDAYLNAVVGTALIKKYPKLESEFVYGDYKVYDV
RKMIAKSEQEIGKATAKYFFYSNIMNFFKTEITLANGEIRKRPLIETNGETGEIVWDKG
RDFATVRKVLSMPQVNIVKKTEVQTGGFSKESILPKRNSDKLIARKKDWDPKKYGGFDS
PTVAYSVLVVAKVEKGKSKKLKSVKELLGITIMERSSFEKNPIDFLEAKGYKEVKKDLI
IKLPKYSLFELENGRKRMLASAGELQKGNELALPSKYVNFLYLASHYEKLKGSPEDNEQ
KQLFVEQHKHYLDEIIEQISEFSKRVILADANLDKVLSAYNKHRDKPIREQAENIIHLF
TLTNLGAPAAFKYFDTTIDRKRYTSTKEVLDATLIHQSITGLYETRIDLSQLGGDSGGS
KRTADGSEFEPKKKRKVGGGGSGATNFSLLKQAGDVEENPGPMVSKGEELFTGVVPILV
ELDGDVNGHKFSVSGEGEGDATYGKLTLKFICTTGKLPVPWPTLVTTLTYGVQCFSRYP
DHMKQHDFFKSAMPEGYVQERTIFFKDDGNYKTRAEVKFEGDTLVNRIELKGIDFKEDG
NILGHKLEYNYNSHNVYIMADKQKNGIKVNFKIRHNIEDGSVQLADHYQQNTPIGDGPV
LLPDNHYLSTQSALSKDPNEKRDHMVLLEFVTAAGITLGMDELYK
BE4max-ΔUGI, SEQ ID NO: 425
MKRTADGSEFESPKKKRKVSSETGPVAVDPTLRRRIEPHEFEVFFDPRELRKETCLLYE
INWGGRHSIWRHTSQNTNKHVEVNFIEKFTTERYFCPNTRCSITWFLSWSPCGECSRAI
TEFLSRYPHVTLFIYIARLYHHADPRNRQGLRDLISSGVTIQIMTEQESGYCWRNFVNY
SPSNEAHWPRYPHLWVRLYVLELYCIILGLPPCLNILRRKQPQLTFFTIALQSCHYQRL
PPHILWATGLKSGGSSGGSSGSETPGTSESATPESSGGSSGGSDKKYSIGLAIGTNSVG
WAVITDEYKVPSKKFKVLGNTDRHSIKKNLIGALLFDSGETAEATRLKRTARRRYTRRK
NRICYLQEIFSNEMAKVDDSFFHRLEESFLVEEDKKHERHPIFGNIVDEVAYHEKYPTI
YHLRKKLVDSTDKADLRLIYLALAHMIKFRGHFLIEGDLNPDNSDVDKLFIQLVQTYNQ
LFEENPINASGVDAKAILSARLSKSRRLENLIAQLPGEKKNGLFGNLIALSLGLTPNFK
SNFDLAEDAKLQLSKDTYDDDLDNLLAQIGDQYADLFLAAKNLSDAILLSDILRVNTEI
TKAPLSASMIKRYDEHHQDLTLLKALVRQQLPEKYKEIFFDQSKNGYAGYIDGGASQEE
FYKFIKPILEKMDGTEELLVKLNREDLLRKQRTFDNGSIPHQIHLGELHAILRRQEDFY
PFLKDNREKIEKILTFRIPYYVGPLARGNSRFAWMTRKSEETITPWNFEEVVDKGASAQ
SFIERMTNFDKNLPNEKVLPKHSLLYEYFTVYNELTKVKYVTEGMRKPAFLSGEQKKAI
VDLLFKTNRKVTVKQLKEDYFKKIECFDSVEISGVEDRFNASLGTYHDLLKIIKDKDFL
DNEENEDILEDIVLTLTLFEDREMIEERLKTYAHLFDDKVMKQLKRRRYTGWGRLSRKL
INGIRDKQSGKTILDFLKSDGFANRNFMQLIHDDSLTFKEDIQKAQVSGQGDSLHEHIA
NLAGSPAIKKGILQTVKVVDELVKVMGRHKPENIVIEMARENQTTQKGQKNSRERMKRI
EEGIKELGSQILKEHPVENTQLQNEKLYLYYLQNGRDMYVDQELDINRLSDYDVDHIVP
QSFLKDDSIDNKVLTRSDKNRGKSDNVPSEEVVKKMKNYWRQLLNAKLITQRKFDNLTK
AERGGLSELDKAGFIKRQLVETRQITKHVAQILDSRMNTKYDENDKLIREVKVITLKSK
LVSDFRKDFQFYKVREINNYHHAHDAYLNAVVGTALIKKYPKLESEFVYGDYKVYDVRK
MIAKSEQEIGKATAKYFFYSNIMNFFKTEITLANGEIRKRPLIETNGETGEIVWDKGRD
FATVRKVLSMPQVNIVKKTEVQTGGFSKESILPKRNSDKLIARKKDWDPKKYGGFDSPT
VAYSVLVVAKVEKGKSKKLKSVKELLGITIMERSSFEKNPIDFLEAKGYKEVKKDLIIK
LPKYSLFELENGRKRMLASAGELQKGNELALPSKYVNFLYLASHYEKLKGSPEDNEQKQ
LFVEQHKHYLDEIIEQISEFSKRVILADANLDKVLSAYNKHRDKPIREQAENIIHLFTL
TNLGAPAAFKYFDTTIDRKRYTSTKEVLDATLIHQSITGLYETRIDLSQLGGDSGGSKR
TADGSEFEPKKKRKVGGGGSGATNFSLLKQAGDVEENPGPMVSKGEELFTGVVPILVEL
DGDVNGHKFSVSGEGEGDATYGKLTLKFICTTGKLPVPWPTLVTTLTYGVQCFSRYPDH
MKQHDFFKSAMPEGYVQERTIFFKDDGNYKTRAEVKFEGDTLVNRIELKGIDFKEDGNI
LGHKLEYNYNSHNVYIMADKQKNGIKVNFKIRHNIEDGSVQLADHYQQNTPIGDGPVLL
PDNHYLSTQSALSKDPNEKRDHMVLLEFVTAAGITLGMDELYK
eA3A-BE3-ΔUGI-eUNG, SEQ ID NO: 426
MEASPASGPRHLMDPHIFTSNFNNGIGRHKTYLCYEVERLDNGTSVKMDQHRGFLHGQA
KNLLCGFYGRHAELRFLDLVPSLQLDPAQIYRVTWFISWSPCFSWGCAGEVRAFLQENT
HVRLRIFAARIYDYDPLYKEALQMLRDAGAQVSIMTYDEFKHCWDTFVDHQGCPFQPWD
GLDEHSQALSGRLRAILQNQGNSGSETPGTSESATPESDKKYSIGLAIGTNSVGWAVIT
DEYKVPSKKFKVLGNTDRHSIKKNLIGALLFDSGETAEATRLKRTARRRYTRRKNRICY
LQEIFSNEMAKVDDSFFHRLEESFLVEEDKKHERHPIFGNIVDEVAYHEKYPTIYHLRK
KLVDSTDKADLRLIYLALAHMIKFRGHFLIEGDLNPDNSDVDKLFIQLVQTYNQLFEEN
PINASGVDAKAILSARLSKSRRLENLIAQLPGEKKNGLFGNLIALSLGLTPNFKSNFDL
AEDAKLQLSKDTYDDDLDNLLAQIGDQYADLFLAAKNLSDAILLSDILRVNTEITKAPL
SASMIKRYDEHHQDLTLLKALVRQQLPEKYKEIFFDQSKNGYAGYIDGGASQEEFYKFI
KPILEKMDGTEELLVKLNREDLLRKQRTFDNGSIPHQIHLGELHAILRRQEDFYPFLKD
NREKIEKILTFRIPYYVGPLARGNSRFAWMTRKSEETITPWNFEEVVDKGASAQSFIER
MTNFDKNLPNEKVLPKHSLLYEYFTVYNELTKVKYVTEGMRKPAFLSGEQKKAIVDLLF
KTNRKVTVKQLKEDYFKKIECFDSVEISGVEDRFNASLGTYHDLLKIIKDKDFLDNEEN
EDILEDIVLTLTLFEDREMIEERLKTYAHLFDDKVMKQLKRRRYTGWGRLSRKLINGIR
DKQSGKTILDFLKSDGFANRNFMQLIHDDSLTFKEDIQKAQVSGQGDSLHEHIANLAGS
PAIKKGILQTVKVVDELVKVMGRHKPENIVIEMARENQTTQKGQKNSRERMKRIEEGIK
ELGSQILKEHPVENTQLQNEKLYLYYLQNGRDMYVDQELDINRLSDYDVDHIVPQSFLK
DDSIDNKVLTRSDKNRGKSDNVPSEEVVKKMKNYWRQLLNAKLITQRKFDNLTKAERGG
LSELDKAGFIKRQLVETRQITKHVAQILDSRMNTKYDENDKLIREVKVITLKSKLVSDF
RKDFQFYKVREINNYHHAHDAYLNAVVGTALIKKYPKLESEFVYGDYKVYDVRKMIAKS
EQEIGKATAKYFFYSNIMNFFKTEITLANGEIRKRPLIETNGETGEIVWDKGRDFATVR
KVLSMPQVNIVKKTEVQTGGFSKESILPKRNSDKLIARKKDWDPKKYGGFDSPTVAYSV
LVVAKVEKGKSKKLKSVKELLGITIMERSSFEKNPIDFLEAKGYKEVKKDLIIKLPKYS
LFELENGRKRMLASAGELQKGNELALPSKYVNFLYLASHYEKLKGSPEDNEQKQLFVEQ
HKHYLDEIIEQISEFSKRVILADANLDKVLSAYNKHRDKPIREQAENIIHLFTLTNLGA
PAAFKYFDTTIDRKRYTSTKEVLDATLIHQSITGLYETRIDLSQLGGDSGGSANELTWH
DVLAEEKQQPYFLNTLQTVASERQSGVTIYPPQKDVFNAFRFTELGDVKVVILGQDPYH
GPGQAHGLAFSVRPGIAIPPSLLNMYKELENTIPGFTRPNHGYLESWARQGVLLLNTVL
TVRAGQAHSHASLGWETFTDKVISLINQHREGVVFLLWGSHAQKKGAIIDKQRHHVLKA
PHPSPLSAHRGFFGCNHFVLANQWLEQRGETPIDWMPVLPAESESGGSPKKKRKVGGGG
SGATNFSLLKQAGDVEENPGPMVSKGEELFTGVVPILVELDGDVNGHKFSVSGEGEGDA
TYGKLTLKFICTTGKLPVPWPTLVTTLTYGVQCFSRYPDHMKQHDFFKSAMPEGYVQER
TIFFKDDGNYKTRAEVKFEGDTLVNRIELKGIDFKEDGNILGHKLEYNYNSHNVYIMAD
KQKNGIKVNFKIRHNIEDGSVQLADHYQQNTPIGDGPVLLPDNHYLSTQSALSKDPNEK
RDHMVLLEFVTAAGITLGMDELYK
BE4max(R33A) w/o UGI = miniCGBEl, SEQ ID NO: 427
MKRTADGSEFESPKKKRKVSSETGPVAVDPTLRRRIEPHEFEVFFDPRELAKETCLLYE
INWGGRHSIWRHTSQNTNKHVEVNFIEKFTTERYFCPNTRCSITWFLSWSPCGECSRAI
TEFLSRYPHVTLFIYIARLYHHADPRNRQGLRDLISSGVTIQIMTEQESGYCWRNFVNY
SPSNEAHWPRYPHLWVRLYVLELYCIILGLPPCLNILRRKQPQLTFFTIALQSCHYQRL
PPHILWATGLKSGGSSGGSSGSETPGTSESATPESSGGSSGGSDKKYSIGLAIGTNSVG
WAVITDEYKVPSKKFKVLGNTDRHSIKKNLIGALLFDSGETAEATRLKRTARRRYTRRK
NRICYLQEIFSNEMAKVDDSFFHRLEESFLVEEDKKHERHPIFGNIVDEVAYHEKYPTI
YHLRKKLVDSTDKADLRLIYLALAHMIKFRGHFLIEGDLNPDNSDVDKLFIQLVQTYNQ
LFEENPINASGVDAKAILSARLSKSRRLENLIAQLPGEKKNGLFGNLIALSLGLTPNFK
SNFDLAEDAKLQLSKDTYDDDLDNLLAQIGDQYADLFLAAKNLSDAILLSDILRVNTEI
TKAPLSASMIKRYDEHHQDLTLLKALVRQQLPEKYKEIFFDQSKNGYAGYIDGGASQEE
FYKFIKPILEKMDGTEELLVKLNREDLLRKQRTFDNGSIPHQIHLGELHAILRRQEDFY
PFLKDNREKIEKILTFRIPYYVGPLARGNSRFAWMTRKSEETITPWNFEEVVDKGASAQ
SFIERMTNFDKNLPNEKVLPKHSLLYEYFTVYNELTKVKYVTEGMRKPAFLSGEQKKAI
VDLLFKTNRKVTVKQLKEDYFKKIECFDSVEISGVEDRFNASLGTYHDLLKIIKDKDFL
DNEENEDILEDIVLTLTLFEDREMIEERLKTYAHLFDDKVMKQLKRRRYTGWGRLSRKL
INGIRDKQSGKTILDFLKSDGFANRNFMQLIHDDSLTFKEDIQKAQVSGQGDSLHEHIA
NLAGSPAIKKGILQTVKVVDELVKVMGRHKPENIVIEMARENQTTQKGQKNSRERMKRI
EEGIKELGSQILKEHPVENTQLQNEKLYLYYLQNGRDMYVDQELDINRLSDYDVDHIVP
QSFLKDDSIDNKVLTRSDKNRGKSDNVPSEEVVKKMKNYWRQLLNAKLITQRKFDNLTK
AERGGLSELDKAGFIKRQLVETRQITKHVAQILDSRMNTKYDENDKLIREVKVITLKSK
LVSDFRKDFQFYKVREINNYHHAHDAYLNAVVGTALIKKYPKLESEFVYGDYKVYDVRK
MIAKSEQEIGKATAKYFFYSNIMNFFKTEITLANGEIRKRPLIETNGETGEIVWDKGRD
FATVRKVLSMPQVNIVKKTEVQTGGFSKESILPKRNSDKLIARKKDWDPKKYGGFDSPT
VAYSVLVVAKVEKGKSKKLKSVKELLGITIMERSSFEKNPIDFLEAKGYKEVKKDLIIK
LPKYSLFELENGRKRMLASAGELQKGNELALPSKYVNFLYLASHYEKLKGSPEDNEQKQ
LFVEQHKHYLDEIIEQISEFSKRVILADANLDKVLSAYNKHRDKPIREQAENIIHLFTL
TNLGAPAAFKYFDTTIDRKRYTSTKEVLDATLIHQSITGLYETRIDLSQLGGDSGGSKR
TADGSEFEPKKKRKVGGGGSGATNFSLLKQAGDVEENPGPMVSKGEELFTGVVPILVEL
DGDVNGHKFSVSGEGEGDATYGKLTLKFICTTGKLPVPWPTLVTTLTYGVQCFSRYPDH
MKQHDFFKSAMPEGYVQERTIFFKDDGNYKTRAEVKFEGDTLVNRIELKGIDFKEDGNI
LGHKLEYNYNSHNVYIMADKQKNGIKVNFKIRHNIEDGSVQLADHYQQNTPIGDGPVLL
PDNHYLSTQSALSKDPNEKRDHMVLLEFVTAAGITLGMDELYK
CGBE1_NG, SEQ ID NO: 428
MKRTADGSEFESPKKKRKVANELTWHDVLAEEKQQPYFLNTLQTVASERQSGVTIYPPQ
KDVFNAFRFTELGDVKVVILGQDPYHGPGQAHGLAFSVRPGIAIPPSLLNMYKELENTI
PGFTRPNHGYLESWARQGVLLLNTVLTVRAGQAHSHASLGWETFTDKVISLINQHREGV
VFLLWGSHAQKKGAIIDKQRHHVLKAPHPSPLSAHRGFFGCNHFVLANQWLEQRGETPI
DWMPVLPAESESGGSGGSGGSSSETGPVAVDPTLRRRIEPHEFEVFFDPRELAKETCLL
YEINWGGRHSIWRHTSQNTNKHVEVNFIEKFTTERYFCPNTRCSITWFLSWSPCGECSR
AITEFLSRYPHVTLFIYIARLYHHADPRNRQGLRDLISSGVTIQIMTEQESGYCWRNFV
NYSPSNEAHWPRYPHLWVRLYVLELYCIILGLPPCLNILRRKQPQLTFFTIALQSCHYQ
RLPPHILWATGLKSGGSSGGSSGSETPGTSESATPESSGGSSGGSDKKYSIGLAIGTNS
VGWAVITDEYKVPSKKFKVLGNTDRHSIKKNLIGALLFDSGETAEATRLKRTARRRYTR
RKNRICYLQEIFSNEMAKVDDSFFHRLEESFLVEEDKKHERHPIFGNIVDEVAYHEKYP
TIYHLRKKLVDSTDKADLRLIYLALAHMIKFRGHFLIEGDLNPDNSDVDKLFIQLVQTY
NQLFEENPINASGVDAKAILSARLSKSRRLENLIAQLPGEKKNGLFGNLIALSLGLTPN
FKSNFDLAEDAKLQLSKDTYDDDLDNLLAQIGDQYADLFLAAKNLSDAILLSDILRVNT
EITKAPLSASMIKRYDEHHQDLTLLKALVRQQLPEKYKEIFFDQSKNGYAGYIDGGASQ
EEFYKFIKPILEKMDGTEELLVKLNREDLLRKQRTFDNGSIPHQIHLGELHAILRRQED
FYPFLKDNREKIEKILTFRIPYYVGPLARGNSRFAWMTRKSEETITPWNFEEVVDKGAS
AQSFIERMTNFDKNLPNEKVLPKHSLLYEYFTVYNELTKVKYVTEGMRKPAFLSGEQKK
AIVDLLFKTNRKVTVKQLKEDYFKKIECFDSVEISGVEDRFNASLGTYHDLLKIIKDKD
FLDNEENEDILEDIVLTLTLFEDREMIEERLKTYAHLFDDKVMKQLKRRRYTGWGRLSR
KLINGIRDKQSGKTILDFLKSDGFANRNFMQLIHDDSLTFKEDIQKAQVSGQGDSLHEH
IANLAGSPAIKKGILQTVKVVDELVKVMGRHKPENIVIEMARENQTTQKGQKNSRERMK
RIEEGIKELGSQILKEHPVENTQLQNEKLYLYYLQNGRDMYVDQELDINRLSDYDVDHI
VPQSFLKDDSIDNKVLTRSDKNRGKSDNVPSEEVVKKMKNYWRQLLNAKLITQRKFDNL
TKAERGGLSELDKAGFIKRQLVETRQITKHVAQILDSRMNTKYDENDKLIREVKVITLK
SKLVSDFRKDFQFYKVREINNYHHAHDAYLNAVVGTALIKKYPKLESEFVYGDYKVYDV
RKMIAKSEQEIGKATAKYFFYSNIMNFFKTEITLANGEIRKRPLIETNGETGEIVWDKG
RDFATVRKVLSMPQVNIVKKTEVQTGGFSKESIRPKRNSDKLIARKKDWDPKKYGGFVS
PTVAYSVLVVAKVEKGKSKKLKSVKELLGITIMERSSFEKNPIDFLEAKGYKEVKKDLI
IKLPKYSLFELENGRKRMLASARFLQKGNELALPSKYVNFLYLASHYEKLKGSPEDNEQ
KQLFVEQHKHYLDEIIEQISEFSKRVILADANLDKVLSAYNKHRDKPIREQAENIIHLF
TLTNLGAPRAFKYFDTTIDRKVYRSTKEVLDATLIHQSITGLYETRIDLSQLGGDSGGS
KRTADGSEFEPKKKRKVGGGGSGATNFSLLKQAGDVEENPGPMVSKGEELFTGVVPILV
ELDGDVNGHKFSVSGEGEGDATYGKLTLKFICTTGKLPVPWPTLVTTLTYGVQCFSRYP
DHMKQHDFFKSAMPEGYVQERTIFFKDDGNYKTRAEVKFEGDTLVNRIELKGIDFKEDG
NILGHKLEYNYNSHNVYIMADKQKNGIKVNFKIRHNIEDGSVQLADHYQQNTPIGDGPV
LLPDNHYLSTQSALSKDPNEKRDHMVLLEFVTAAGITLGMDELYK
miniCGBE1_NG, SEQ ID NO: 429
MKRTADGSEFESPKKKRKVSSETGPVAVDPTLRRRIEPHEFEVFFDPRELAKETCLLYE
INWGGRHSIWRHTSQNTNKHVEVNFIEKFTTERYFCPNTRCSITWFLSWSPCGECSRAI
TEFLSRYPHVTLFIYIARLYHHADPRNRQGLRDLISSGVTIQIMTEQESGYCWRNFVNY
SPSNEAHWPRYPHLWVRLYVLELYCIILGLPPCLNILRRKQPQLTFFTIALQSCHYQRL
PPHILWATGLKSGGSSGGSSGSETPGTSESATPESSGGSSGGSDKKYSIGLAIGTNSVG
WAVITDEYKVPSKKFKVLGNTDRHSIKKNLIGALLFDSGETAEATRLKRTARRRYTRRK
NRICYLQEIFSNEMAKVDDSFFHRLEESFLVEEDKKHERHPIFGNIVDEVAYHEKYPTI
YHLRKKLVDSTDKADLRLIYLALAHMIKFRGHFLIEGDLNPDNSDVDKLFIQLVQTYNQ
LFEENPINASGVDAKAILSARLSKSRRLENLIAQLPGEKKNGLFGNLIALSLGLTPNFK
SNFDLAEDAKLQLSKDTYDDDLDNLLAQIGDQYADLFLAAKNLSDAILLSDILRVNTEI
TKAPLSASMIKRYDEHHQDLTLLKALVRQQLPEKYKEIFFDQSKNGYAGYIDGGASQEE
FYKFIKPILEKMDGTEELLVKLNREDLLRKQRTFDNGSIPHQIHLGELHAILRRQEDFY
PFLKDNREKIEKILTFRIPYYVGPLARGNSRFAWMTRKSEETITPWNFEEVVDKGASAQ
SFIERMTNFDKNLPNEKVLPKHSLLYEYFTVYNELTKVKYVTEGMRKPAFLSGEQKKAI
VDLLFKTNRKVTVKQLKEDYFKKIECFDSVEISGVEDRFNASLGTYHDLLKIIKDKDFL
DNEENEDILEDIVLTLTLFEDREMIEERLKTYAHLFDDKVMKQLKRRRYTGWGRLSRKL
INGIRDKQSGKTILDFLKSDGFANRNFMQLIHDDSLTFKEDIQKAQVSGQGDSLHEHIA
NLAGSPAIKKGILQTVKVVDELVKVMGRHKPENIVIEMARENQTTQKGQKNSRERMKRI
EEGIKELGSQILKEHPVENTQLQNEKLYLYYLQNGRDMYVDQELDINRLSDYDVDHIVP
QSFLKDDSIDNKVLTRSDKNRGKSDNVPSEEVVKKMKNYWRQLLNAKLITQRKFDNLTK
AERGGLSELDKAGFIKRQLVETRQITKHVAQILDSRMNTKYDENDKLIREVKVITLKSK
LVSDFRKDFQFYKVREINNYHHAHDAYLNAVVGTALIKKYPKLESEFVYGDYKVYDVRK
MIAKSEQEIGKATAKYFFYSNIMNFFKTEITLANGEIRKRPLIETNGETGEIVWDKGRD
FATVRKVLSMPQVNIVKKTEVQTGGFSKESIRPKRNSDKLIARKKDWDPKKYGGFVSPT
VAYSVLVVAKVEKGKSKKLKSVKELLGITIMERSSFEKNPIDFLEAKGYKEVKKDLIIK
LPKYSLFELENGRKRMLASARFLQKGNELALPSKYVNFLYLASHYEKLKGSPEDNEQKQ
LFVEQHKHYLDEIIEQISEFSKRVILADANLDKVLSAYNKHRDKPIREQAENIIHLFTL
TNLGAPRAFKYFDTTIDRKVYRSTKEVLDATLIHQSITGLYETRIDLSQLGGDSGGSKR
TADGSEFEPKKKRKVGGGGSGATNFSLLKQAGDVEENPGPMVSKGEELFTGVVPILVEL
DGDVNGHKFSVSGEGEGDATYGKLTLKFICTTGKLPVPWPTLVTTLTYGVQCFSRYPDH
MKQHDFFKSAMPEGYVQERTIFFKDDGNYKTRAEVKFEGDTLVNRIELKGIDFKEDGNI
LGHKLEYNYNSHNVYIMADKQKNGIKVNFKIRHNIEDGSVQLADHYQQNTPIGDGPVLL
PDNHYLSTQSALSKDPNEKRDHMVLLEFVTAAGITLGMDELYK
CGBE1_VRQR, SEQ ID NO: 430
MKRTADGSEFESPKKKRKVANELTWHDVLAEEKQQPYFLNTLQTVASERQSGVTIYPPQ
KDVFNAFRFTELGDVKVVILGQDPYHGPGQAHGLAFSVRPGIAIPPSLLNMYKELENTI
PGFTRPNHGYLESWARQGVLLLNTVLTVRAGQAHSHASLGWETFTDKVISLINQHREGV
VFLLWGSHAQKKGAIIDKQRHHVLKAPHPSPLSAHRGFFGCNHFVLANQWLEQRGETPI
DWMPVLPAESESGGSGGSGGSSSETGPVAVDPTLRRRIEPHEFEVFFDPRELAKETCLL
YEINWGGRHSIWRHTSQNTNKHVEVNFIEKFTTERYFCPNTRCSITWFLSWSPCGECSR
AITEFLSRYPHVTLFIYIARLYHHADPRNRQGLRDLISSGVTIQIMTEQESGYCWRNFV
NYSPSNEAHWPRYPHLWVRLYVLELYCIILGLPPCLNILRRKQPQLTFFTIALQSCHYQ
RLPPHILWATGLKSGGSSGGSSGSETPGTSESATPESSGGSSGGSDKKYSIGLAIGTNS
VGWAVITDEYKVPSKKFKVLGNTDRHSIKKNLIGALLFDSGETAEATRLKRTARRRYTR
RKNRICYLQEIFSNEMAKVDDSFFHRLEESFLVEEDKKHERHPIFGNIVDEVAYHEKYP
TIYHLRKKLVDSTDKADLRLIYLALAHMIKFRGHFLIEGDLNPDNSDVDKLFIQLVQTY
NQLFEENPINASGVDAKAILSARLSKSRRLENLIAQLPGEKKNGLFGNLIALSLGLTPN
FKSNFDLAEDAKLQLSKDTYDDDLDNLLAQIGDQYADLFLAAKNLSDAILLSDILRVNT
EITKAPLSASMIKRYDEHHQDLTLLKALVRQQLPEKYKEIFFDQSKNGYAGYIDGGASQ
EEFYKFIKPILEKMDGTEELLVKLNREDLLRKQRTFDNGSIPHQIHLGELHAILRRQED
FYPFLKDNREKIEKILTFRIPYYVGPLARGNSRFAWMTRKSEETITPWNFEEVVDKGAS
AQSFIERMTNFDKNLPNEKVLPKHSLLYEYFTVYNELTKVKYVTEGMRKPAFLSGEQKK
AIVDLLFKTNRKVTVKQLKEDYFKKIECFDSVEISGVEDRFNASLGTYHDLLKIIKDKD
FLDNEENEDILEDIVLTLTLFEDREMIEERLKTYAHLFDDKVMKQLKRRRYTGWGRLSR
KLINGIRDKQSGKTILDFLKSDGFANRNFMQLIHDDSLTFKEDIQKAQVSGQGDSLHEH
IANLAGSPAIKKGILQTVKVVDELVKVMGRHKPENIVIEMARENQTTQKGQKNSRERMK
RIEEGIKELGSQILKEHPVENTQLQNEKLYLYYLQNGRDMYVDQELDINRLSDYDVDHI
VPQSFLKDDSIDNKVLTRSDKNRGKSDNVPSEEVVKKMKNYWRQLLNAKLITQRKFDNL
TKAERGGLSELDKAGFIKRQLVETRQITKHVAQILDSRMNTKYDENDKLIREVKVITLK
SKLVSDFRKDFQFYKVREINNYHHAHDAYLNAVVGTALIKKYPKLESEFVYGDYKVYDV
RKMIAKSEQEIGKATAKYFFYSNIMNFFKTEITLANGEIRKRPLIETNGETGEIVWDKG
RDFATVRKVLSMPQVNIVKKTEVQTGGFSKESILPKRNSDKLIARKKDWDPKKYGGFVS
PTVAYSVLVVAKVEKGKSKKLKSVKELLGITIMERSSFEKNPIDFLEAKGYKEVKKDLI
IKLPKYSLFELENGRKRMLASARELQKGNELALPSKYVNFLYLASHYEKLKGSPEDNEQ
KQLFVEQHKHYLDEIIEQISEFSKRVILADANLDKVLSAYNKHRDKPIREQAENIIHLF
TLTNLGAPAAFKYFDTTIDRKQYRSTKEVLDATLIHQSITGLYETRIDLSQLGGDSGGS
KRTADGSEFEPKKKRKVGGGGSGATNFSLLKQAGDVEENPGPMVSKGEELFTGVVPILV
ELDGDVNGHKFSVSGEGEGDATYGKLTLKFICTTGKLPVPWPTLVTTLTYGVQCFSRYP
DHMKQHDFFKSAMPEGYVQERTIFFKDDGNYKTRAEVKFEGDTLVNRIELKGIDFKEDG
NILGHKLEYNYNSHNVYIMADKQKNGIKVNFKIRHNIEDGSVQLADHYQQNTPIGDGPV
LLPDNHYLSTQSALSKDPNEKRDHMVLLEFVTAAGITLGMDELYK
miniCGBE1_VRQR, SEQ ID NO: 431
MKRTADGSEFESPKKKRKVSSETGPVAVDPTLRRRIEPHEFEVFFDPRELAKETCLLYE
INWGGRHSIWRHTSQNTNKHVEVNFIEKFTTERYFCPNTRCSITWFLSWSPCGECSRAI
TEFLSRYPHVTLFIYIARLYHHADPRNRQGLRDLISSGVTIQIMTEQESGYCWRNFVNY
SPSNEAHWPRYPHLWVRLYVLELYCIILGLPPCLNILRRKQPQLTFFTIALQSCHYQRL
PPHILWATGLKSGGSSGGSSGSETPGTSESATPESSGGSSGGSDKKYSIGLAIGTNSVG
WAVITDEYKVPSKKFKVLGNTDRHSIKKNLIGALLFDSGETAEATRLKRTARRRYTRRK
NRICYLQEIFSNEMAKVDDSFFHRLEESFLVEEDKKHERHPIFGNIVDEVAYHEKYPTI
YHLRKKLVDSTDKADLRLIYLALAHMIKFRGHFLIEGDLNPDNSDVDKLFIQLVQTYNQ
LFEENPINASGVDAKAILSARLSKSRRLENLIAQLPGEKKNGLFGNLIALSLGLTPNFK
SNFDLAEDAKLQLSKDTYDDDLDNLLAQIGDQYADLFLAAKNLSDAILLSDILRVNTEI
TKAPLSASMIKRYDEHHQDLTLLKALVRQQLPEKYKEIFFDQSKNGYAGYIDGGASQEE
FYKFIKPILEKMDGTEELLVKLNREDLLRKQRTFDNGSIPHQIHLGELHAILRRQEDFY
PFLKDNREKIEKILTFRIPYYVGPLARGNSRFAWMTRKSEETITPWNFEEVVDKGASAQ
SFIERMTNFDKNLPNEKVLPKHSLLYEYFTVYNELTKVKYVTEGMRKPAFLSGEQKKAI
VDLLFKTNRKVTVKQLKEDYFKKIECFDSVEISGVEDRFNASLGTYHDLLKIIKDKDFL
DNEENEDILEDIVLTLTLFEDREMIEERLKTYAHLFDDKVMKQLKRRRYTGWGRLSRKL
INGIRDKQSGKTILDFLKSDGFANRNFMQLIHDDSLTFKEDIQKAQVSGQGDSLHEHIA
NLAGSPAIKKGILQTVKVVDELVKVMGRHKPENIVIEMARENQTTQKGQKNSRERMKRI
EEGIKELGSQILKEHPVENTQLQNEKLYLYYLQNGRDMYVDQELDINRLSDYDVDHIVP
QSFLKDDSIDNKVLTRSDKNRGKSDNVPSEEVVKKMKNYWRQLLNAKLITQRKFDNLTK
AERGGLSELDKAGFIKRQLVETRQITKHVAQILDSRMNTKYDENDKLIREVKVITLKSK
LVSDFRKDFQFYKVREINNYHHAHDAYLNAVVGTALIKKYPKLESEFVYGDYKVYDVRK
MIAKSEQEIGKATAKYFFYSNIMNFFKTEITLANGEIRKRPLIETNGETGEIVWDKGRD
FATVRKVLSMPQVNIVKKTEVQTGGFSKESILPKRNSDKLIARKKDWDPKKYGGFVSPT
VAYSVLVVAKVEKGKSKKLKSVKELLGITIMERSSFEKNPIDFLEAKGYKEVKKDLIIK
LPKYSLFELENGRKRMLASARELQKGNELALPSKYVNFLYLASHYEKLKGSPEDNEQKQ
LFVEQHKHYLDEIIEQISEFSKRVILADANLDKVLSAYNKHRDKPIREQAENIIHLFTL
TNLGAPAAFKYFDTTIDRKQYRSTKEVLDATLIHQSITGLYETRIDLSQLGGDSGGSKR
TADGSEFEPKKKRKVGGGGSGATNFSLLKQAGDVEENPGPMVSKGEELFTGVVPILVEL
DGDVNGHKFSVSGEGEGDATYGKLTLKFICTTGKLPVPWPTLVTTLTYGVQCFSRYPDH
MKQHDFFKSAMPEGYVQERTIFFKDDGNYKTRAEVKFEGDTLVNRIELKGIDFKEDGNI
LGHKLEYNYNSHNVYIMADKQKNGIKVNFKIRHNIEDGSVQLADHYQQNTPIGDGPVLL
PDNHYLSTQSALSKDPNEKRDHMVLLEFVTAAGITLGMDELYK
Prime Editor 1 (PE1), SEQ ID NO: 432
MKRTADGSEFESPKKKRKVDKKYSIGLDIGTNSVGWAVITDEYKVPSKKFKVLGNTDRH
SIKKNLIGALLFDSGETAEATRLKRTARRRYTRRKNRICYLQEIFSNEMAKVDDSFFHR
LEESFLVEEDKKHERHPIFGNIVDEVAYHEKYPTIYHLRKKLVDSTDKADLRLIYLALA
HMIKFRGHFLIEGDLNPDNSDVDKLFIQLVQTYNQLFEENPINASGVDAKAILSARLSK
SRRLENLIAQLPGEKKNGLFGNLIALSLGLTPNFKSNFDLAEDAKLQLSKDTYDDDLDN
LLAQIGDQYADLFLAAKNLSDAILLSDILRVNTEITKAPLSASMIKRYDEHHQDLTLLK
ALVRQQLPEKYKEIFFDQSKNGYAGYIDGGASQEEFYKFIKPILEKMDGTEELLVKLNR
EDLLRKQRTFDNGSIPHQIHLGELHAILRRQEDFYPFLKDNREKIEKILTFRIPYYVGP
LARGNSRFAWMTRKSEETITPWNFEEVVDKGASAQSFIERMTNFDKNLPNEKVLPKHSL
LYEYFTVYNELTKVKYVTEGMRKPAFLSGEQKKAIVDLLFKTNRKVTVKQLKEDYFKKI
ECFDSVEISGVEDRFNASLGTYHDLLKIIKDKDFLDNEENEDILEDIVLTLTLFEDREM
IEERLKTYAHLFDDKVMKQLKRRRYTGWGRLSRKLINGIRDKQSGKTILDFLKSDGFAN
RNFMQLIHDDSLTFKEDIQKAQVSGQGDSLHEHIANLAGSPAIKKGILQTVKVVDELVK
VMGRHKPENIVIEMARENQTTQKGQKNSRERMKRIEEGIKELGSQILKEHPVENTQLQN
EKLYLYYLQNGRDMYVDQELDINRLSDYDVDAIVPQSFLKDDSIDNKVLTRSDKNRGKS
DNVPSEEVVKKMKNYWRQLLNAKLITQRKFDNLTKAERGGLSELDKAGFIKRQLVETRQ
ITKHVAQILDSRMNTKYDENDKLIREVKVITLKSKLVSDFRKDFQFYKVREINNYHHAH
DAYLNAVVGTALIKKYPKLESEFVYGDYKVYDVRKMIAKSEQEIGKATAKYFFYSNIMN
FFKTEITLANGEIRKRPLIETNGETGEIVWDKGRDFATVRKVLSMPQVNIVKKTEVQTG
GFSKESILPKRNSDKLIARKKDWDPKKYGGFDSPTVAYSVLVVAKVEKGKSKKLKSVKE
LLGITIMERSSFEKNPIDFLEAKGYKEVKKDLIIKLPKYSLFELENGRKRMLASAGELQ
KGNELALPSKYVNFLYLASHYEKLKGSPEDNEQKQLFVEQHKHYLDEIIEQISEFSKRV
ILADANLDKVLSAYNKHRDKPIREQAENIIHLFTLTNLGAPAAFKYFDTTIDRKRYTST
KEVLDATLIHQSITGLYETRIDLSQLGGDSGGSSGGSSGSETPGTSESATPESSGGSSG
GSSTLNIEDEYRLHETSKEPDVSLGSTWLSDFPQAWAETGGMGLAVRQAPLIIPLKATS
TPVSIKQYPMSQEARLGIKPHIQRLLDQGILVPCQSPWNTPLLPVKKPGTNDYRPVQDL
REVNKRVEDIHPTVPNPYNLLSGLPPSHQWYTVLDLKDAFFCLRLHPTSQPLFAFEWRD
PEMGISGQLTWTRLPQGFKNSPTLFDEALHRDLADFRIQHPDLILLQYVDDLLLAATSE
LDCQQGTRALLQTLGNLGYRASAKKAQICQKQVKYLGYLLKEGQRWLTEARKETVMGQP
TPKTPRQLREFLGTAGFCRLWIPGFAEMAAPLYPLTKTGTLFNWGPDQQKAYQEIKQAL
LTAPALGLPDLTKPFELFVDEKQGYAKGVLTQKLGPWRRPVAYLSKKLDPVAAGWPPCL
RMVAAIAVLTKDAGKLTMGQPLVILAPHAVEALVKQPPDRWLSNARMTHYQALLLDTDR
VQFGPVVALNPATLLPLPEEGLQHNCLDILAEAHGTRPDLTDQPLPDADHTWYTDGSSL
LQEGQRKAGAAVTTETEVIWAKALPAGTSAQRAELIALTQALKMAEGKKLNVYTDSRYA
FATAHIHGEIYRRRGLLTSEGKEIKNKDEILALLKALFLPKRLSIIHCPGHQKGHSAEA
RGNRMADQAARKAAITETPDTSTLLIENSSPSGGSKRTADGSEFEPKKKRKV
Prime Editor 2 (PE2), SEQ ID NO: 433
MKRTADGSEFESPKKKRKVDKKYSIGLDIGTNSVGWAVITDEYKVPSKKFKVLGNTDRH
SIKKNLIGALLFDSGETAEATRLKRTARRRYTRRKNRICYLQEIFSNEMAKVDDSFFHR
LEESFLVEEDKKHERHPIFGNIVDEVAYHEKYPTIYHLRKKLVDSTDKADLRLIYLALA
HMIKFRGHFLIEGDLNPDNSDVDKLFIQLVQTYNQLFEENPINASGVDAKAILSARLSK
SRRLENLIAQLPGEKKNGLFGNLIALSLGLTPNFKSNFDLAEDAKLQLSKDTYDDDLDN
LLAQIGDQYADLFLAAKNLSDAILLSDILRVNTEITKAPLSASMIKRYDEHHQDLTLLK
ALVRQQLPEKYKEIFFDQSKNGYAGYIDGGASQEEFYKFIKPILEKMDGTEELLVKLNR
EDLLRKQRTFDNGSIPHQIHLGELHAILRRQEDFYPFLKDNREKIEKILTFRIPYYVGP
LARGNSRFAWMTRKSEETITPWNFEEVVDKGASAQSFIERMTNFDKNLPNEKVLPKHSL
LYEYFTVYNELTKVKYVTEGMRKPAFLSGEQKKAIVDLLFKTNRKVTVKQLKEDYFKKI
ECFDSVEISGVEDRFNASLGTYHDLLKIIKDKDFLDNEENEDILEDIVLTLTLFEDREM
IEERLKTYAHLFDDKVMKQLKRRRYTGWGRLSRKLINGIRDKQSGKTILDFLKSDGFAN
RNFMQLIHDDSLTFKEDIQKAQVSGQGDSLHEHIANLAGSPAIKKGILQTVKVVDELVK
VMGRHKPENIVIEMARENQTTQKGQKNSRERMKRIEEGIKELGSQILKEHPVENTQLQN
EKLYLYYLQNGRDMYVDQELDINRLSDYDVDAIVPQSFLKDDSIDNKVLTRSDKNRGKS
DNVPSEEVVKKMKNYWRQLLNAKLITQRKFDNLTKAERGGLSELDKAGFIKRQLVETRQ
ITKHVAQILDSRMNTKYDENDKLIREVKVITLKSKLVSDFRKDFQFYKVREINNYHHAH
DAYLNAVVGTALIKKYPKLESEFVYGDYKVYDVRKMIAKSEQEIGKATAKYFFYSNIMN
FFKTEITLANGEIRKRPLIETNGETGEIVWDKGRDFATVRKVLSMPQVNIVKKTEVQTG
GFSKESILPKRNSDKLIARKKDWDPKKYGGFDSPTVAYSVLVVAKVEKGKSKKLKSVKE
LLGITIMERSSFEKNPIDFLEAKGYKEVKKDLIIKLPKYSLFELENGRKRMLASAGELQ
KGNELALPSKYVNFLYLASHYEKLKGSPEDNEQKQLFVEQHKHYLDEIIEQISEFSKRV
ILADANLDKVLSAYNKHRDKPIREQAENIIHLFTLTNLGAPAAFKYFDTTIDRKRYTST
KEVLDATLIHQSITGLYETRIDLSQLGGDSGGSSGGSSGSETPGTSESATPESSGGSSG
GSSTLNIEDEYRLHETSKEPDVSLGSTWLSDFPQAWAETGGMGLAVRQAPLIIPLKATS
TPVSIKQYPMSQEARLGIKPHIQRLLDQGILVPCQSPWNTPLLPVKKPGTNDYRPVQDL
REVNKRVEDIHPTVPNPYNLLSGLPPSHQWYTVLDLKDAFFCLRLHPTSQPLFAFEWRD
PEMGISGQLTWTRLPQGFKNSPTLFNEALHRDLADFRIQHPDLILLQYVDDLLLAATSE
LDCQQGTRALLQTLGNLGYRASAKKAQICQKQVKYLGYLLKEGQRWLTEARKETVMGQP
TPKTPRQLREFLGKAGFCRLFIPGFAEMAAPLYPLTKPGTLFNWGPDQQKAYQEIKQAL
LTAPALGLPDLTKPFELFVDEKQGYAKGVLTQKLGPWRRPVAYLSKKLDPVAAGWPPCL
RMVAAIAVLTKDAGKLTMGQPLVILAPHAVEALVKQPPDRWLSNARMTHYQALLLDTDR
VQFGPVVALNPATLLPLPEEGLQHNCLDILAEAHGTRPDLTDQPLPDADHTWYTDGSSL
LQEGQRKAGAAVTTETEVIWAKALPAGTSAQRAELIALTQALKMAEGKKLNVYTDSRYA
FATAHIHGEIYRRRGWLTSEGKEIKNKDEILALLKALFLPKRLSIIHCPGHQKGHSAEA
RGNRMADQAARKAAITETPDTSTLLIENSSPSGGSKRTADGSEFEPKKKRKV
CAST system, CRISPR-associated transposase
from cyanobacteria Scytonema hofmanni-
ShCas12k (WP_029636312.1) SEQ ID NO: 434
MSQITIQARLISFESNRQQLWKLMADLNTPLINELLCQLGQHPDFEKWQQKGKLPSTVV
SQLCQPLKTDPRFAGQPSRLYMSAIHIVDYIYKSWLAIQKRLQQQLDGKTRWLEMLNSD
AELVELSGDTLEAIRVKAAEILAIAMPASESDSASPKGKKGKKEKKPSSSSPKRSLSKT
LFDAYQETEDIKSRSAISYLLKNGCKLTDKEEDSEKFAKRRRQVEIQIQRLTEKLISRM
PKGRDLTNAKWLETLLTATTTVAEDNAQAKRWQDILLTRSSSLPFPLVFETNEDMVWSK
NQKGRLCVHFNGLSDLIFEVYCGNRQLHWFQRFLEDQQTKRKSKNQHSSGLFTLRNGHL
VWLEGEGKGEPWNLHHLTLYCCVDNRLWTEEGTEIVRQEKADEITKFITNMKKKSDLSD
TQQALIQRKQSTLTRINNSFERPSQPLYQGQSHILVGVSLGLEKPATVAVVDAIANKVL
AYRSIKQLLGDNYELLNRQRRQQQYLSHERHKAQKNFSPNQFGASELGQHIDRLLAKAI
VALARTYKAGSIVLPKLGDMREVVQSEIQAIAEQKFPGYIEGQQKYAKQYRVNVHRWSY
GRLIQSIQSKAAQTGIVIEEGKQPIRGSPHDKAKELALSAYNLRLTRRS
CAST system, CRISPR-associated transposase
from cyanobacteria Scytonema hofmanni-
ShTniQ -- WP_029636334.1 SEQ ID NO: 435
MIEAPDVKPWLFLIKPYEGESLSHFLGRFRRANHLSASGLGTLAGIGAIVARWERFHFN
PRPSQQELEAIASVVEVDAQRLAQMLPPAGVGMQHEPIRLCGACYAESPCHRIEWQYKS
VWKCDRHQLKILAKCPNCQAPFKMPALWEDGCCHRCRMPFAEMAKLQKV
CAST system, CRISPR-associated transposase
from cyanobacteria Scytonema hofmanni-
ShTnsB -- WP_084763316.1 SEQ ID NO: 436
MNSQQNPDLAVHPLAIPMEGLLGESATTLEKNVIATQLSEEAQVKLEVIQSLLEPCDRT
TYGQKLREAAEKLNVSLRTVQRLVKNWEQDGLVGLTQTSRADKGKHRIGEFWENFITKT
YKEGNKGSKRMTPKQVALRVEAKARELKDSKPPNYKTVLRVLAPILEKQQKAKSIRSPG
WRGTTLSVKTREGKDLSVDYSNHVWQCDHTRVDVLLVDQHGEILSRPWLTTVIDTYSRC
IMGINLGFDAPSSGVVALALRHAILPKRYGSEYKLHCEWGTYGKPEHFYTDGGKDFRSN
HLSQIGAQLGFVCHLRDRPSEGGVVERPFKTLNDQLFSTLPGYTGSNVQERPEDAEKDA
RLTLRELEQLLVRYIVDRYNQSIDARMGDQTRFERWEAGLPTVPVPIPERDLDICLMKQ
SRRTVQRGGCLQFQNLMYRGEYLAGYAGETVNLRFDPRDITTILVYRQENNQEVFLTRA
HAQGLETEQLALDEAEAASRRLRTAGKTISNQSLLQEVVDRDALVATKKSRKERQKLEQ
TVLRSAAVDESNRESLPSQIVEPDEVESTETVHSQYEDIEVWDYEQLREEYGF
CAST system, CRISPR-associated transposase
from cyanobacteria Scytonema hofmanni-
ShTnsC - WP_029636336.1 SEQ ID NO: 437
MTEAQAIAKQLGGVKPDDEWLQAEIARLKGKSIVPLQQVKTLHDWLDGKRKARKSCRVV
GESRTGKTVACDAYRYRHKPQQEAGRPPTVPVVYIRPHQKCGPKDLFKKITEYLKYRVT
KGTVSDFRDRTIEVLKGCGVEMLIIDEADRLKPETFADVRDIAEDLGIAVVLVGTDRLD
AVIKRDEQVLERFRAHLRFGKLSGEDFKNTVEMWEQMVLKLPVSSNLKSKEMLRILTSA
TEGYIGRLDEILREAAIRSLSRGLKKIDKAVLQEVAKEYK
INTEGRATE system - Vibrio cholerae TniQ, Cas8,
Cas7 ,and Cas6 (CASCADE) SEQ ID NO: 438
MFLQRPKPYSDESLESFFIRVANKNGYGDVHRFLEATKRFLQDIDHNGYQTFPTDITRI
NPYSAKNSSSARTASFLKLAQLTFNEPPELLGLAINRTNMKYSPSTSAVVRGAEVFPRS
LLRTHSIPCCPLCLRENGYASYLWHFQGYEYCHSHNVPLITTCSCGKEFDYRVSGLKGI
CCKCKEPITLTSRENGHEAACTVSNWLAGHESKPLPNLPKSYRWGLVHWWMGIKDSEFD
HFSFVQFFSNWPRSFHSIIEDEVEFNLEHAVVSTSELRLKDLLGRLFFGSIRLPERNLQ
HNIILGELLCYLENRLWQDKGLIANLKMNALEATVMLNCSLDQIASMVEQRILKPNRKS
KPNSPLDVTDYLFHFGDIFCLWLAEFQSDEFNRSFYVSRWMQTLKELIASNPDDLTTEL
KRAFRPLTPHIAIDGNELDALTILVNLTDKTDDQKDLLDRAKCKQKLRDEKWWASCINC
VNYRQSHNPKFPDIRSEGVIRTQALGELPSFLLSSSKIPPYHWSYSHDSKYVNKSAFLT
NEFCWDGEISCLGELLKDADHPLWNTLKKLGCSQKTCKAMAKQLADITLTTINVTLAPN
YLTQISLPDSDTSYISLSPVASLSMQSHFHQRLQDENRHSAITRFSRTTNMGVTAMTCG
GAFRMLKSGAKFSSPPHHRLNSKRSWLTSEHVQSLKQYQRLNKSLIPENSRIALRRKYK
IELQNMVRSWFAMQDHTLDSNILIQHLNHDLSYLGATKRFAYDPAMTKLFTELLKRELS
NSINNGEQHTNGSFLVLPNIRVCGATALSSPVTVGIPSLTAFFGFVHAFERNINRTTSS
FRVESFAICVHQLHVEKRGLTAEFVEKGDGTISAPATRDDWQCDVVFSLILNTNFAQHI
DQDTLVTSLPKRLARGSAKIAIDDFKHINSFSTLETAIESLPIEAGRWLSLYAQSNNNL
SDLLAAMTEDHQLMASCVGYHLLEEPKDKPNSLRGYKHAIAECIIGLINSITFSSETDP
NTIFWSLKNYQNYLVVQPRSINDETTDKSSLMEAASLAYDVSGQPIKSATAEALAQGNP
HQVDFCHVPYGASHIECSFSVSFSSELRQPYKCNSSKVKQTLVQLVELYETKIGWTELA
TRYLMNICNGKWLWKNTRKAYCWNIVLTPWPWNGEKVGFEDIRTNYTSRQDFKNNKNWS
AIVEMIKTAFSSTDGLAIFEVRATLHLPTNAMVRPSQVFTEKESGSKSKSKTQNSRVFQ
STTIDGERSPILGAFKTGAAIATIDDWYPEATEPLRVGRFGVHREDVTCYRHPSTGKDF
FSILQQAEHYIEVLSANKTPAQETINDMHFLMANLIKGGMFQHKGD
INTEGRATE system - Vibrio cholerae TnsA, TnsB,
and TnsC SEQ ID NO: 439
MATSLPTPSAITTSALEYAFHTPARNLTKSRGKNIHRYVSVKMSKRITVESTLECDACY
HFDFEPSIVRFCAQPIRFLYYLNGQSHSYVPDFLVQFDTNEFVLYEVKSAYAKNKPDFD
VEWEAKVKAATELGLELELVEESDIRDTVVLNNLKRMHRYASKDELNNVHNSLLKIIKY
NGAQSARCLGEQLGLKGRTVLPILCDLLSRCLLDTRLDKPLSLESRFELASYGMSETRE
ARISRAKRAFVSTPSVRKILSYMDRCRDLSDLESEPTCMMVYGASGVGKTTVIKKYLNQ
NRRESEAGGDIIPVLHIELPDNAKPVDAARELLVEMGDPLALYETDLARLTKRLTELIP
AVGVKLIIIDEFQHLVEERSNRVLTQVGNWLKMILNKTKCPIVIFGMPYSKVVLQANSQ
LHGRFSIQVELRPFSYQGGRGVFKTFLEYLDKALPFEKQAGLANESLQKKLYAFSQGNM
RSLRNLIYQASIEAIDNQHETITEEDFVFASKLTSGDKPNSWKNPFEEGVEVTEDMLRP
PPKDIGWEDYLRHSTPRVSKPGRNKNFFEMAKKGFSSFHRKAVSSQDTLESIELVSSAN
CLESVTYQDISAFPETIAVEINFRLSILRFLARKCETIVAKSIEPHRVELQQNYSRKIP
SAITIYRWWLAFRKSDYNPISLAPNIKDRGNRETKVSTVVDSIMEQAVERVISGRKVNV
SSAYKRVRRKVRQYNLTHGTKYTYPKYESVRKRVKKKTPFELLAAGKGERVAKREFRRM
GKKILTSSVLERVEIDHTVVDLFAVHEEYRIPLGRPWLTQLVDCYSKAVIGFYLGFEPP
SYVSVSLALKNAIQRKDDLISSYESIENEWLCYGIPDLLVTDNGKEFLSKAFDQACESL
LINVHQNKVETPDNKPHVERNYGTINTSLLDDLPGKSFSQYLQREGYDSVGEATLTLNE
IREIYLIWLVDIYHKKPNQRGTNCPNVAWKKGCQEWEPEEFSGSKDELDFKFAIVDYKQ
LTKVGITVYKELSYSNDRLAEYRGKKGNHKVQFKYNPECMAVIWVLDEDMNEYFTVNAI
DYEYASRVSLWQHKYNMKYQAELNSAEYDEDKEIDAEIKIEEIADRSIVKTNKIRARRR
GARHQENSARAKSISNANPASIQKHEDEIVSADNDDWDIDYV
Escherichia phage P1 (Bacteriophage P1) Cre
Recombinase (Uniprot P06956), SEQ ID NO: 440
MSNLLTVHQNLPALPVDATSDEVRKNLMDMFRDRQAFSEHTWKMLLSVCRSWAAWCKLN
NRKWFPAEPEDVRDYLLYLQARGLAVKTIQQHLGQLNMLHRRSGLPRPSDSNAVSLVMR
RIRKENVDAGERAKQALAFERTDFDQVRSLMENSDRCQDIRNLAFLGIAYNTLLRIAEI
ARIRVKDISRTDGGRMLIHIGRTKTLVSTAGVEKALSLGVTKLVERWISVSGVADDPNN
YLFCRVRKNGVAAPSATSQLSTRALEGIFEATHRLIYGAKDDSGQRYLAWSGHSARVGA
ARDMARAGVSIPEIMQAGGWTNVNIVMNYIRNLDSETGAMVRLLEDGD

What is claimed is:

1. A method for identifying a genetic modifier to alter expression of a target gene in a selected cell type, the method comprising:
providing, optionally from a database, one or more candidate regulatory motif sequences with regulatory potential in the selected cell type;
selecting a sequence of a putative regulatory region of the target gene, preferably wherein the putative regulatory region is in a promoter, enhancer, insulator, untranslated region (UTR), or intron, optionally in a non-coding region of the target gene;
comparing the sequence of the putative regulatory region to the candidate regulatory motif sequences,
identifying a candidate regulatory motif sequence that has either no identity at all as a potential insertion site or that has at least 500% identity and at least one mismatch to a portion of the sequence of the regulatory sequence as a potential substitution site;
determining sequence alterations needed to make the putative regulatory region match the candidate regulatory motif sequence; and
identifying one or more genetic modifiers capable of making the sequence alterations needed to make the putative regulatory region match the candidate regulatory motif sequence, or;
optionally wherein identifying a genetic modifier comprises using an algorithm that compares the putative regulatory region and candidate regulatory motif sequences from a database and identifies candidate regulatory motif sequences that differ from the putative regulatory region by at least one nucleotide and up to 100% as a potential insertion site, or that differ from the putative regulatory region by at least one nucleotide and up to a selected amount, optionally at least 50% identity, as a potential substitution site, determines sequence alterations needed to make the putative regulatory region match the candidate regulatory motif sequence, compares the sequence alterations to a database of modifications that could be made by a set of genetic modifiers, and identifying one or more genetic modifiers that can alter the putative regulatory region to match the candidate regulatory motif sequence, to thereby introduce a functional regulatory motif.

2. The method of claim 1, wherein the candidate regulatory sequence motif has regulatory potential to affect target gene expression at the pre-transcriptional or post-transcriptional level.

3. The method of claim 2, wherein the candidate regulatory sequence motif is a transcription factor binding sequence that can recruit endogenous transcription factors within a cell type or cell types of interest, where the sequence motif may or may not exist in the genome of the selected cell type.

4. The method of claim 2, wherein the candidate regulatory sequence motif alters spacing of endogenous transcription factor binding sites in the putative regulatory region.

5. The method of claim 2, wherein the candidate regulatory sequence motif is a response element that is activated by a receptor-ligand complex through binding of an exogenously delivered small molecule, hormone, or drug for inducible target gene activation.

6. The method of claim 2, wherein the candidate regulatory sequence motif either stabilizes or de-stabilizes target gene transcripts, where the candidate regulatory sequence motif may or may not exist in the genome of the selected cell type.

7. The method of claim 2, wherein the candidate regulatory sequence motif is a hybridization target for endogenous non-coding RNAs, where the sequence motif that may or may not exist in the genome of interest.

8. The method of claim 2, wherein the candidate regulatory sequence motif modifies the translation initiation and/or elongation efficiency for target gene transcripts, and wherein the candidate regulatory sequence motif may or may not exist in the genome of the selected cell type.

9. The method of claims 1-8, wherein the putative regulatory region has the potential to modify expression of the target gene at the pre-transcriptional or post-transcriptional level.

10. The method of claim 9, wherein the putative regulatory region is a non-coding DNA sequence within 1 Mb or more of a target gene of interest, or spatially-proximal as determined by chromosome conformation capture assays.

11. The method of claim 9, wherein the putative regulatory region is a promoter of a target gene of interest.

12. The method of claim 9, wherein the putative regulatory region comprises putative enhancer elements of a target gene of interest as defined by histone marks associated and/or chromatin accessibility features associated with functional enhancer elements; putative insulator elements of the target gene of interest as defined by histone marks associated and/or chromatin accessibility features associated with functional insulator elements; and/or putative silencer elements of the target genes of interest as defined by histone marks associated and/or chromatin accessibility features associated with functional silencer elements.

13. The method of claim 9, wherein the putative regulatory region comprises untranslated regions (UTRs) of the target gene transcripts.

14. The method of claim 9, wherein the putative regulatory regions comprise an intronic region of the target gene transcripts.

15. The method of claim 9, wherein the putative regulatory regions comprises a coding sequence of target gene transcripts.

16. The method of claims 1-15, wherein the identified genetic modifier can introduce a specific sequence motif or modification at the target genomic region.

17. The method of claim 16, wherein the genetic modifier comprises a CRISPR-Cas domain, a zinc-finger DNA binding domain, or a transcription activator-like (TAL) effector domain.

18. The method of claim 17, wherein the CRISPR-Cas domain is used with a gRNA, wherein the gRNA comprises a sequence complementary to a sequence of the target cis-regulatory element of interest.

19. The method of claim 16, wherein the genetic modifier is a programmable nuclease, a base editor, or a prime editor.

20. The method of claim 17, wherein the CRISPR-Cas prime editor further comprises a prime editing gRNA (pegRNA) and nicking sgRNA (ngRNA) wherein the pegRNA and ngRNA comprise a sequence complementary to a sequence of the target cis-regulatory element of interest.

21. A method for altering expression of a target gene in a selected cell type, the method comprising:
providing, optionally from a database, one or more candidate regulatory motif sequences with regulatory potential in the selected cell type;
selecting a sequence of a putative regulatory region of the target gene, preferably wherein the putative regulatory region is in a promoter, enhancer, insulator, untranslated region (UTR), or intron, optionally in a non-coding region of the target gene;
comparing the sequence of the putative regulatory region to the candidate regulatory motif sequences,
identifying a candidate regulatory motif sequence that has either no identity at all as a potential insertion site or that has at least 50% identity and at least one mismatch to a portion of the sequence of the regulatory sequence as a potential substitution site;
determining sequence alterations needed to make the putative regulatory region match the candidate regulatory motif sequence; and
identifying one or more genetic modifiers capable of making the sequence alterations needed to make the putative regulatory region match the candidate regulatory motif sequence, and
contacting the cell with the one or more genetic modifiers under conditions and for a time sufficient for the one or more genetic modifiers to make the putative regulatory region match the candidate regulatory motif sequence.

22. The method of claim 21, wherein identifying a genetic modifier comprises using an algorithm that compares the putative regulatory region and candidate regulatory motif sequences from a database and identifies candidate regulatory motif sequences that differ from the putative regulatory region by at least one nucleotide and up to 100% as a potential insertion site, or that differ from the putative regulatory region by at least one nucleotide and up to a selected amount, optionally at least 50% identity, as a potential substitution site, determines sequence alterations needed to make the putative regulatory region match the candidate regulatory motif sequence, compares the sequence alterations to a database of modifications that could be made by a set of genetic modifiers, and identifying one or more genetic modifiers that can alter the putative regulatory region to match the candidate regulatory motif sequence, to thereby introduce a functional regulatory motif.

23. A method for altering expression of a target gene in a selected cell, the method comprising contacting the selected cell with a genetic modifier identified using the method of claims 1-20, under conditions sufficient to increase the target gene expression in the cell.

24. A method for heterotopic activation of a target gene expression in a selected cell, the method comprising contacting the cell with a genetic modifier identified using the method of claims 1-20, under conditions sufficient to increase the target gene expression in the cell.

25. The method of claims 21-24, wherein the candidate regulatory sequence motif is introduced into the putative regulatory region as a single motif or a repetitive sequence with multiple copies of the single motif, optionally with linker sequences therebetween.

26. The method of claims 21-24, wherein the genetic modifier introduces multiplex edits to alter expression of a single target gene.

27. The method of claims 21-24, wherein the genetic modifier introduces multiplex edits in to alter expression of multiple target genes.

28. The method of any one of claims 1-27, wherein the cell is a eukaryotic cell.

29. The method of claim 28, wherein the cell is a mammalian cell.

30. The method of claim 29, wherein the cell is a human cell.

31. A method for treating or reducing risk of a condition or a disease in a subject, wherein the condition or the disease is caused, at least in part, by insufficient expression of the target gene, the method comprising administering to the subject an effective amount of a genetic modifier identified using the method of any one of claims 1-20, under conditions sufficient to increase the target gene expression in the cell, thereby treating or reducing risk of the condition or the disease in the subject.

32. The method of claim 31, wherein the condition or the disease is caused, at least in part, by insufficient expression of the target gene on an allele.

33. The method of claim 31, wherein the condition or the disease is related to haploinsufficiency.

34. The method of claim 31 or 32, wherein the condition or the disease is caused, at least in part, by a dominant-negative gene.

35. The method of claim 31 or 32, wherein the condition or the disease is caused, at least in part, by insufficient expression of a target gene that is under the control of an enhancer, wherein the enhancer controls the expression of a plurality of genes.

36. The method of any one of claims 31-35, wherein the method causes an increase in the expression of the target gene in the cell or in the cell of the subject by at least 1.1 fold as measured by mRNA expression.

37. A method for treating or reducing risk of a condition or a disease in a subject, wherein the condition or the disease is caused, at least in part, by overexpression of the target gene, the method comprising administering to the subject an effective amount of a genetic modifier identified using the method of any one of claims 1-20, under conditions sufficient to increase the target gene expression in the cell, thereby treating or reducing risk of the condition or the disease in the subject.

38. The method of any one of claims 31-37, wherein the method causes a decrease in the expression of the target gene in the cell or in the cell of the subject by at least 1.1 fold.

The application's sequence listing, which the Patent Office published only in electronic form, follows.

SEQUENCE LISTING (726 sequences)

SEQ ID NO: 1 - protein, 7 aa, Simian virus 40
PKKKRRV

SEQ ID NO: 2 - protein, 18 aa, Unknown
  Description of Unknown: Bipartite NLS sequence
KRTADGSEFESPKKKRKV

SEQ ID NO: 3 - protein, 16 aa, Unknown
  Description of Unknown: Nucleoplasmin NLS sequence
KRPAATKKAGQAKKKK

SEQ ID NO: 4 - DNA, 104 bp, Artificial Sequence
  Description of Artificial Sequence: Synthetic polynucleotide
  modified_base (1)..(20): This region may encompass one of the following sequences: "aaccacacaacgctatgaca" or "tgccacataagtgaccacgt" or "tacc agctctgggagaccac" or "ttccagctggtccctagaag" or "gaccaattt actgggtacgt"
  See specification as filed for detailed description of substitutions and preferred embodiments
nnnnnnnnnnnnnnnnnnnncgttttagagctagaaatagcaagttaaaataaggctagtccgttatcaacttgaaaaagtggcaccgagtcggtgcttttttt

SEQ ID NO: 5 - DNA, 23 bp, Artificial Sequence
  Description of Artificial Sequence: Synthetic oligonucleotide
  modified_base (1)..(2): a, c, t, g, unknown or other
  modified_base (6)..(21): a, c, t, g, unknown or other
nnccannnnnnnnnnnnnnnngg

SEQ ID NO: 6 - DNA, 20 bp, Artificial Sequence
  Description of Artificial Sequence: Synthetic oligonucleotide
aaccacacaacgctatgaca

SEQ ID NO: 7 - DNA, 20 bp, Artificial Sequence
  Description of Artificial Sequence: Synthetic oligonucleotide
tgccacataagtgaccacgt

SEQ ID NO: 8 - DNA, 20 bp, Artificial Sequence
  Description of Artificial Sequence: Synthetic oligonucleotide
taccagctctgggagaccac

SEQ ID NO: 9 - DNA, 20 bp, Artificial Sequence
  Description of Artificial Sequence: Synthetic oligonucleotide
ttccagctggtccctagaag

SEQ ID NO: 10 - DNA, 20 bp, Artificial Sequence
  Description of Artificial Sequence: Synthetic oligonucleotide
gaccaatttactgggtacgt

SEQ ID NO: 11 - DNA, 123 bp, Artificial Sequence
  Description of Artificial Sequence: Synthetic polynucleotide
  modified_base (1)..(20): a, c, t, g, unknown or other
  modified_base (97)..(116): a, c, t, g, unknown or other
  See specification as filed for detailed description of substitutions and preferred embodiments
nnnnnnnnnnnnnnnnnnnngttttagagctagaaatagcaagttaaaataaggctagtccgttatcaacttgaaaaagtggcaccgagtcggtgcnnnnnnnnnnnnnnnnnnnnttttttt

SEQ ID NO: 12 - DNA, 60 bp, Artificial Sequence
  Description of Artificial Sequence: Synthetic oligonucleotide
agggcttcctcacccctagcttctcgccaggcgggggccaatcagcgccctgggctattt

SEQ ID NO: 13 - DNA, 72 bp, Artificial Sequence
  Description of Artificial Sequence: Synthetic oligonucleotide
agggcttcctcacccctagcttctcgccaggcgggggccaatcagcgggccaatcagcgccctgggctattt

SEQ ID NO: 14 - DNA, 60 bp, Artificial Sequence
  Description of Artificial Sequence: Synthetic oligonucleotide
agggcttcctcacccctagcttctcgccaggcggggccccgcccccgccctgggctattt

SEQ ID NO: 15 - DNA, 72 bp, Artificial Sequence
  Description of Artificial Sequence: Synthetic oligonucleotide
agggcttcctcacccctagcttctcgccaggcggggccccgcccccggccccgcccccgccctgggctattt

SEQ ID NO: 16 - DNA, 60 bp, Artificial Sequence
  Description of Artificial Sequence: Synthetic oligonucleotide
agggcttcctcacccctagcttctcgccaggcggcacttccgggttgccctgggctattt

SEQ ID NO: 17 - DNA, 72 bp, Artificial Sequence
  Description of Artificial Sequence: Synthetic oligonucleotide
agggcttcctcacccctagcttctcgccaggcggcacttccgggttcacttccgggttgccctgggctattt

SEQ ID NO: 18 - DNA, 57 bp, Artificial Sequence
  Description of Artificial Sequence: Synthetic oligonucleotide
agggcttcctcacccctagcttctcgccaggcggccttatctggccctgggctattt

SEQ ID NO: 19 - DNA, 66 bp, Artificial Sequence
  Description of Artificial Sequence: Synthetic oligonucleotide
agggcttcctcacccctagcttctcgccaggcggccttatctgccttatctggccctgggctattt

SEQ ID NO: 20 - DNA, 75 bp, Artificial Sequence
  Description of Artificial Sequence: Synthetic oligonucleotide
agggcttcctcacccctagcttctcgccaggcggccttatctgccttatctgccttatctggccctgggctattt

SEQ ID NO: 21 - DNA, 60 bp, Artificial Sequence
  Description of Artificial Sequence: Synthetic oligonucleotide
agggcttcctcacccctagcttctcgccaggcggttccttccttccgccctgggctattt

SEQ ID NO: 22 - DNA, 72 bp, Artificial Sequence
  Description of Artificial Sequence: Synthetic oligonucleotide
agggcttcctcacccctagcttctcgccaggcggttccttccttccttccttccttccgccctgggctattt

SEQ ID NO: 23 - DNA, 63 bp, Artificial Sequence
  Description of Artificial Sequence: Synthetic oligonucleotide
gcccctccacactggcgtgcgcgctaggtcccctagggggccaatcagcccgggcagggaggg

SEQ ID NO: 24 - DNA, 75 bp, Artificial Sequence
  Description of Artificial Sequence: Synthetic oligonucleotide
gcccctccacactggcgtgcgcgctaggtcccctagggggccaatcagcgggccaatcagcccgggcagggaggg

SEQ ID NO: 25 - DNA, 63 bp, Artificial Sequence
  Description of Artificial Sequence: Synthetic oligonucleotide
gcccctccacactggcgtgcgcgctaggtcccctaggggccccgcccccccgggcagggaggg

SEQ ID NO: 26 - DNA, 75 bp, Artificial Sequence
  Description of Artificial Sequence: Synthetic oligonucleotide
gcccctccacactggcgtgcgcgctaggtcccctaggggccccgcccccggccccgcccccccgggcagggaggg

SEQ ID NO: 27 - DNA, 63 bp, Artificial Sequence
  Description of Artificial Sequence: Synthetic oligonucleotide
gcccctccacactggcgtgcgcgctaggtcccctaggcacttccgggttccgggcagggaggg

SEQ ID NO: 28 - DNA, 75 bp, Artificial Sequence
  Description of Artificial Sequence: Synthetic oligonucleotide
gcccctccacactggcgtgcgcgctaggtcccctaggcacttccgggttcacttccgggttccgggcagggaggg

SEQ ID NO: 29 - DNA, 60 bp, Artificial Sequence
  Description of Artificial Sequence: Synthetic oligonucleotide
gcccctccacactggcgtgcgcgctaggtcccctaggccttatctgccgggcagggaggg

SEQ ID NO: 30 - DNA, 69 bp, Artificial Sequence
  Description of Artificial Sequence: Synthetic oligonucleotide
gcccctccacactggcgtgcgcgctaggtcccctaggccttatctgccttatctgccgggcagggaggg

SEQ ID NO: 31 - DNA, 78 bp, Artificial Sequence
  Description of Artificial Sequence: Synthetic oligonucleotide
gcccctccacactggcgtgcgcgctaggtcccctaggccttatctgccttatctgccttatctgccgggcagggaggg

SEQ ID NO: 32 - DNA, 63 bp, Artificial Sequence
  Description of Artificial Sequence: Synthetic oligonucleotide
gcccctccacactggcgtgcgcgctaggtcccctaggttccttccttccccgggcagggaggg

SEQ ID NO: 33 - DNA, 75 bp, Artificial Sequence
  Description of Artificial Sequence: Synthetic oligonucleotide
gcccctccacactggcgtgcgcgctaggtcccctaggttccttccttccttccttccttccccgggcagggaggg

SEQ ID NO: 34 - DNA, 63 bp, Artificial Sequence
  Description of Artificial Sequence: Synthetic oligonucleotide
ggcagccctaggcggctgcacttggctctccggcagggggccaatcagccgccctttccaaac

SEQ ID NO: 35 - DNA, 75 bp, Artificial Sequence
  Description of Artificial Sequence: Synthetic oligonucleotide
ggcagccctaggcggctgcacttggctctccggcagggggccaatcagcgggccaatcagccgccctttccaaac

SEQ ID NO: 36 - DNA, 63 bp, Artificial Sequence
  Description of Artificial Sequence: Synthetic oligonucleotide
ggcagccctaggcggctgcacttggctctccggcaggggccccgccccccgccctttccaaac

SEQ ID NO: 37 - DNA, 75 bp, Artificial Sequence
  Description of Artificial Sequence: Synthetic oligonucleotide
ggcagccctaggcggctgcacttggctctccggcaggggccccgcccccggccccgccccccgccctttccaaac

SEQ ID NO: 38 - DNA, 63 bp, Artificial Sequence
  Description of Artificial Sequence: Synthetic oligonucleotide
ggcagccctaggcggctgcacttggctctccggcaggcacttccgggttcgccctttccaaac

SEQ ID NO: 39 - DNA, 75 bp, Artificial Sequence
  Description of Artificial Sequence: Synthetic oligonucleotide
ggcagccctaggcggctgcacttggctctccggcaggcacttccgggttcacttccgggttcgccctttccaaac

SEQ ID NO: 40 - DNA, 60 bp, Artificial Sequence
  Description of Artificial Sequence: Synthetic oligonucleotide
ggcagccctaggcggctgcacttggctctccggcaggccttatctgcgccctttccaaac

SEQ ID NO: 41 - DNA, 69 bp, Artificial Sequence
  Description of Artificial Sequence: Synthetic oligonucleotide
ggcagccctaggcggctgcacttggctctccggcaggccttatctgccttatctgcgccctttccaaac

SEQ ID NO: 42 - DNA, 78 bp, Artificial Sequence
  Description of Artificial Sequence: Synthetic oligonucleotide
ggcagccctaggcggctgcacttggctctccggcaggccttatctgccttatctgccttatctgcgccctttccaaac

SEQ ID NO: 43 - DNA, 63 bp, Artificial Sequence
  Description of Artificial Sequence: Synthetic oligonucleotide
ggcagccctaggcggctgcacttggctctccggcaggttccttccttcccgccctttccaaac

SEQ ID NO: 44 - DNA, 75 bp, Artificial Sequence
  Description of Artificial Sequence: Synthetic oligonucleotide
ggcagccctaggcggctgcacttggctctccggcaggttccttccttccttccttccttcccgccctttccaaac

SEQ ID NO: 45 - DNA, 74 bp, Artificial Sequence
  Description of Artificial Sequence: Synthetic oligonucleotide
gagggagggctgagggtttgaagtccaactcctaagcacttccgggttcacttccgggttccagtgccagaaga

SEQ ID NO: 46 - DNA, 74 bp, Artificial Sequence
  Description of Artificial Sequence: Synthetic oligonucleotide
attgggctggcgtgttcagccaggaaactgcctagccacttccgggttcacttccgggttactctcttctctca

SEQ ID NO: 47 - DNA, 69 bp, Artificial Sequence
  Description of Artificial Sequence: Synthetic oligonucleotide
aggcgtcccggcgctaggagggacgcacccaggcacttccgggttcacttccgggttcctgcgcgaaga

SEQ ID NO: 48 - DNA, 71 bp, Artificial Sequence
  Description of Artificial Sequence: Synthetic oligonucleotide
tcccgggaaggggccgagaggcggggccgccaggtcacttccgggttcacttccgggttcgggcaggtgtg

SEQ ID NO: 49 - DNA, 104 bp, Artificial Sequence; identical to SEQ ID NO: 4
  Description of Artificial Sequence: Synthetic polynucleotide
  modified_base (1)..(20): This region may encompass one of the following sequences: "gaggccaataggaacactgc" or "ctcctgtccggcctgatttg" or "ccac ccctccctctcctgtc" or "cacccgactgctgtatccgc" or "ggccgcagg ggcccgcagac" or "ccaataggaacactgcgggg" or "ctcctctgtcccct
  modified_base (1)..(20): CONT. FROM ABOVE: gatttg" or "gctaggtcccctaccgggca" or "t ccacactggcgtgcgcgct" or "gtggagccacaccctagggt" or "gttgat gacaatatagtttg" or "gctgcatttagggattctccg" or "gactcatcaa cgagcaccag"
  See specification as filed for detailed description of substitutions and preferred embodiments

SEQ ID NO: 50 - DNA, 20 bp, Artificial Sequence
  Description of Artificial Sequence: Synthetic oligonucleotide
gaggccaataggaacactgc

SEQ ID NO: 51 - DNA, 20 bp, Artificial Sequence
  Description of Artificial Sequence: Synthetic oligonucleotide
ctcctgtccggcctgatttg

SEQ ID NO: 52 - DNA, 20 bp, Artificial Sequence
  Description of Artificial Sequence: Synthetic oligonucleotide
ccacccctccctctcctgtc

SEQ ID NO: 53 - DNA, 20 bp, Artificial Sequence
  Description of Artificial Sequence: Synthetic oligonucleotide
cacccgactgctgtatccgc

SEQ ID NO: 54 - DNA, 20 bp, Artificial Sequence
  Description of Artificial Sequence: Synthetic oligonucleotide
ggccgcaggggcccgcagac

SEQ ID NO: 55 - DNA, 20 bp, Artificial Sequence
  Description of Artificial Sequence: Synthetic oligonucleotide
ccaataggaacactgcgggg

SEQ ID NO: 56 - DNA, 20 bp, Artificial Sequence
  Description of Artificial Sequence: Synthetic oligonucleotide
ctcctctgtcccctgatttg

SEQ ID NO: 57 - DNA, 20 bp, Artificial Sequence
  Description of Artificial Sequence: Synthetic oligonucleotide
gctaggtcccctaccgggca

SEQ ID NO: 58 - DNA, 20 bp, Artificial Sequence
  Description of Artificial Sequence: Synthetic oligonucleotide
tccacactggcgtgcgcgct

SEQ ID NO: 59 - DNA, 20 bp, Artificial Sequence
  Description of Artificial Sequence: Synthetic oligonucleotide
gtggagccacaccctagggt

SEQ ID NO: 60 - DNA, 20 bp, Artificial Sequence
  Description of Artificial Sequence: Synthetic oligonucleotide
gttgatgacaatatagtttg

SEQ ID NO: 61 - DNA, 21 bp, Artificial Sequence
  Description of Artificial Sequence: Synthetic oligonucleotide
gctgcatttagggattctccg

SEQ ID NO: 62 - DNA, 20 bp, Artificial Sequence
  Description of Artificial Sequence: Synthetic oligonucleotide
gactcatcaacgagcaccag

SEQ ID NO: 63 - DNA, 12 bp, Unknown
  Description of Unknown: ELF transcription factor motif sequence
aacccggaagtg

SEQ ID NO: 64 - DNA, 12 bp, Unknown
  Description of Unknown: NFY transcription factor motif sequence
gctgattggccc

SEQ ID NO: 65 - DNA, 9 bp, Unknown
  Description of Unknown: GATA1 transcription factor motif sequence
cagataagg

SEQ ID NO: 66 - DNA, 12 bp, Unknown
  Description of Unknown: SP1 transcription factor motif sequence
gggggcggggcc

SEQ ID NO: 67 - DNA, 4 bp, Unknown
  Description of Unknown: EWS-FLI1 transcription factor motif sequence
ggaa

SEQ ID NO: 68 - DNA, 12 bp, Artificial Sequence
  Description of Artificial Sequence: Synthetic oligonucleotide
tgattgcaatca

SEQ ID NO: 69 - DNA, 8 bp, Artificial Sequence
  Description of Artificial Sequence: Synthetic oligonucleotide
ctaattaa

SEQ ID NO: 70 - DNA, 17 bp, Artificial Sequence
  Description of Artificial Sequence: Synthetic oligonucleotide
taatcggaaaacgatta

SEQ ID NO: 71 - DNA, 8 bp, Artificial Sequence
  Description of Artificial Sequence: Synthetic oligonucleotide
ttaagtgc

SEQ ID NO: 72 - DNA, 16 bp, Artificial Sequence
  Description of Artificial Sequence: Synthetic oligonucleotide
aattaaaaaccaatta

SEQ ID NO: 73 - DNA, 15 bp, Artificial Sequence
  Description of Artificial Sequence: Synthetic oligonucleotide
aattggtgctaaatg

SEQ ID NO: 74 - DNA, 14 bp, Artificial Sequence
  Description of Artificial Sequence: Synthetic oligonucleotide
taattagccaatta

SEQ ID NO: 75 - DNA, 11 bp, Artificial Sequence
  Description of Artificial Sequence: Synthetic oligonucleotide
taattaaatta

SEQ ID NO: 76 - DNA, 11 bp, Artificial Sequence
  Description of Artificial Sequence: Synthetic oligonucleotide
aattaattaat

SEQ ID NO: 77 - DNA, 13 bp, Artificial Sequence
  Description of Artificial Sequence: Synthetic oligonucleotide
gttaatgattaac

SEQ ID NO: 78 - DNA, 12 bp, Artificial Sequence
  Description of Artificial Sequence: Synthetic oligonucleotide
taatcatcatta

SEQ ID NO: 79 - DNA, 10 bp, Artificial Sequence
  Description of Artificial Sequence: Synthetic oligonucleotide
tgattgacag

SEQ ID NO: 80 - DNA, 10 bp, Artificial Sequence
  Description of Artificial Sequence: Synthetic oligonucleotide
agccaatcag

SEQ ID NO: 81 - DNA, 9 bp, Artificial Sequence
  Description of Artificial Sequence: Synthetic oligonucleotide
aaatcgata

SEQ ID NO: 82 - DNA, 17 bp, Artificial Sequence
  Description of Artificial Sequence: Synthetic oligonucleotide
atcgataactgatcgat

SEQ ID NO: 83 - DNA, 18 bp, Artificial Sequence
  Description of Artificial Sequence: Synthetic oligonucleotide
atcgataaccctatcgat

SEQ ID NO: 84 - DNA, 9 bp, Artificial Sequence
  Description of Artificial Sequence: Synthetic oligonucleotide
aatcaatga

SEQ ID NO: 85 - DNA, 6 bp, Artificial Sequence
  Description of Artificial Sequence: Synthetic oligonucleotide
tttatg

SEQ ID NO: 86 - DNA, 9 bp, Artificial Sequence
  Description of Artificial Sequence: Synthetic oligonucleotide
tgatttatg

SEQ ID NO: 87 - DNA, 9 bp, Artificial Sequence
  Description of Artificial Sequence: Synthetic oligonucleotide
tgatggatg

SEQ ID NO: 88 - DNA, 9 bp, Artificial Sequence
  Description of Artificial Sequence: Synthetic oligonucleotide
ttgattaat

SEQ ID NO: 89 - DNA, 9 bp, Artificial Sequence
  Description of Artificial Sequence: Synthetic oligonucleotide
gtcgtaaaa

SEQ ID NO: 90 - DNA, 8 bp, Artificial Sequence
  Description of Artificial Sequence: Synthetic oligonucleotide
caataaaa

SEQ ID NO: 91 - DNA, 9 bp, Artificial Sequence
  Description of Artificial Sequence: Synthetic oligonucleotide
gcaataaaa

SEQ ID NO: 92 - DNA, 11 bp, Artificial Sequence
  Description of Artificial Sequence: Synthetic oligonucleotide
taatccgatta

SEQ ID NO: 93 - DNA, 6 bp, Artificial Sequence
  Description of Artificial Sequence: Synthetic oligonucleotide
ggatta

SEQ ID NO: 94 - DNA, 7 bp, Artificial Sequence
  Description of Artificial Sequence: Synthetic oligonucleotide
tcaagga

SEQ ID NO: 95 - DNA, 8 bp, Artificial Sequence
  Description of Artificial Sequence: Synthetic oligonucleotide
ccacttga

SEQ ID NO: 96 - DNA, 10 bp, Artificial Sequence
  Description of Artificial Sequence: Synthetic oligonucleotide
aagatcaaag

SEQ ID NO: 97 - DNA, 13 bp, Artificial Sequence
  Description of Artificial Sequence: Synthetic oligonucleotide
gggtcaaaggtca

SEQ ID NO: 98 - DNA, 13 bp, Artificial Sequence
  Description of Artificial Sequence: Synthetic oligonucleotide
aagtcaaaagtca

SEQ ID NO: 99 - DNA, 14 bp, Artificial Sequence
  Description of Artificial Sequence: Synthetic oligonucleotide
tggggcaaaggtca

SEQ ID NO: 100 - DNA, 12 bp, Artificial Sequence
  Description of Artificial Sequence: Synthetic oligonucleotide
gggtcatgaccc

SEQ ID NO: 101 - DNA, 16 bp, Artificial Sequence
  Description of Artificial Sequence: Synthetic oligonucleotide
tgaccttataaggtca

SEQ ID NO: 102 - DNA, 15 bp, Artificial Sequence
  Description of Artificial Sequence: Synthetic oligonucleotide
tgacctttaaaggtc

SEQ ID NO: 103 - DNA, 15 bp, Artificial Sequence
  Description of Artificial Sequence: Synthetic oligonucleotide
ggtcattcaaggtca

SEQ ID NO: 104 - DNA, 18 bp, Artificial Sequence
  Description of Artificial Sequence: Synthetic oligonucleotide
tgaccttacataaggtca

SEQ ID NO: 105 - DNA, 17 bp, Artificial Sequence
  Description of Artificial Sequence: Synthetic oligonucleotide
aggtcaaactgtgacct

SEQ ID NO: 106 - DNA, 17 bp, Artificial Sequence
  Description of Artificial Sequence: Synthetic oligonucleotide
tgaccttattaaggtca

SEQ ID NO: 107 - DNA, 13 bp, Artificial Sequence
  Description of Artificial Sequence: Synthetic oligonucleotide
aagttcaaggtca

SEQ ID NO: 108 - DNA, 17 bp, Artificial Sequence
  Description of Artificial Sequence: Synthetic oligonucleotide
aggtcatccaaaggtca

SEQ ID NO: 109 - DNA, 14 bp, Artificial Sequence
  Description of Artificial Sequence: Synthetic oligonucleotide
aggtcaaaaggtca

SEQ ID NO: 110 - DNA, 12 bp, Artificial Sequence
  Description of Artificial Sequence: Synthetic oligonucleotide
gtcaaaaagtca

SEQ ID NO: 111 - DNA, 15 bp, Artificial Sequence
  Description of Artificial Sequence: Synthetic oligonucleotide
gggtcattgagttca

SEQ ID NO: 112 - DNA, 16 bp, Artificial Sequence
  Description of Artificial Sequence: Synthetic oligonucleotide
aggtcacgaaaggtca

SEQ ID NO: 113 - DNA, 15 bp, Artificial Sequence
  Description of Artificial Sequence: Synthetic oligonucleotide
aggtcaccctgacct

SEQ ID NO: 114 - DNA, 17 bp, Artificial Sequence
  Description of Artificial Sequence: Synthetic oligonucleotide
ctcgaggtcattgaccc

SEQ ID NO: 115 - DNA, 11 bp, Artificial Sequence
  Description of Artificial Sequence: Synthetic oligonucleotide
gaagtgggtca

SEQ ID NO: 116 - DNA, 9 bp, Artificial Sequence
  Description of Artificial Sequence: Synthetic oligonucleotide
atgacgtca

SEQ ID NO: 117 - DNA, 10 bp, Artificial Sequence
  Description of Artificial Sequence: Synthetic oligonucleotide
atgacgtcat

SEQ ID NO: 118 - DNA, 10 bp, Artificial Sequence
  Description of Artificial Sequence: Synthetic oligonucleotide
atgatgcaat

SEQ ID NO: 119 - DNA, 9 bp, Artificial Sequence
  Description of Artificial Sequence: Synthetic oligonucleotide
ttgcgcaat

SEQ ID NO: 120 - DNA, 11 bp, Artificial Sequence
  Description of Artificial Sequence: Synthetic oligonucleotide
tgctgagtcat

SEQ ID NO: 121 - DNA, 8 bp, Artificial Sequence
  Description of Artificial Sequence: Synthetic oligonucleotide
tgagtcat

SEQ ID NO: 122 - DNA, 15 bp, Artificial Sequence
  Description of Artificial Sequence: Synthetic oligonucleotide
attgctgactcagca

SEQ ID NO: 123 - DNA, 19 bp, Artificial Sequence
  Description of Artificial Sequence: Synthetic oligonucleotide
gaatgacagctgacttctc

SEQ ID NO: 124 - DNA, 19 bp, Artificial Sequence
  Description of Artificial Sequence: Synthetic oligonucleotide
gctaatgcagcaggcatac

SEQ ID NO: 125 - DNA, 9 bp, Artificial Sequence
  Description of Artificial Sequence: Synthetic oligonucleotide
gtcacgtga

SEQ ID NO: 126 - DNA, 9 bp, Artificial Sequence
  Description of Artificial Sequence: Synthetic oligonucleotide
gccacgtgc

SEQ ID NO: 127 - DNA, 7 bp, Artificial Sequence
  Description of Artificial Sequence: Synthetic oligonucleotide
tacgtgc

SEQ ID NO: 128 - DNA, 11 bp, Artificial Sequence
  Description of Artificial Sequence: Synthetic oligonucleotide
gatgacgtggc

SEQ ID NO: 129 - DNA, 9 bp, Artificial Sequence
  Description of Artificial Sequence: Synthetic oligonucleotide
accatatgt

SEQ ID NO: 130 - DNA, 14 bp, Artificial Sequence
  Description of Artificial Sequence: Synthetic oligonucleotide
aaggaaacagatgg

SEQ ID NO: 131 - DNA, 16 bp, Artificial Sequence
  Description of Artificial Sequence: Synthetic oligonucleotide
gggagcagctgcgtcc

SEQ ID NO: 132 - DNA, 9 bp, Artificial Sequence
  Description of Artificial Sequence: Synthetic oligonucleotide
acagctgct

SEQ ID NO: 133 - DNA, 10 bp, Artificial Sequence
  Description of Artificial Sequence: Synthetic oligonucleotide
gcaacaggtg

SEQ ID NO: 134 - DNA, 6 bp, Artificial Sequence
  Description of Artificial Sequence: Synthetic oligonucleotide
caggtg

SEQ ID NO: 135 - DNA, 7 bp, Artificial Sequence
  Description of Artificial Sequence: Synthetic oligonucleotide
acacctg

SEQ ID NO: 136 - DNA, 12 bp, Artificial Sequence
  Description of Artificial Sequence: Synthetic oligonucleotide
tgacagctgtca

SEQ ID NO: 137 - DNA, 16 bp, Artificial Sequence
  Description of Artificial Sequence: Synthetic oligonucleotide
tcacacctaggtgtga

SEQ ID NO: 138 - DNA, 17 bp, Artificial Sequence
  Description of Artificial Sequence: Synthetic oligonucleotide
gtgtgaaatttcacacc

SEQ ID NO: 139 - DNA, 18 bp, Artificial Sequence
  Description of Artificial Sequence: Synthetic oligonucleotide
tcacacctccaaaggtgt

SEQ ID NO: 140 - DNA, 23 bp, Artificial Sequence
  Description of Artificial Sequence: Synthetic oligonucleotide
acctaaaaggtgtgaaattcaca

SEQ ID NO: 141 - DNA, 9 bp, Artificial Sequence
  Description of Artificial Sequence: Synthetic oligonucleotide
gtggggtga

SEQ ID NO: 142 - DNA, 10 bp, Artificial Sequence
  Description of Artificial Sequence: Synthetic oligonucleotide
ctcttgcctc

SEQ ID NO: 143 - DNA, 8 bp, Artificial Sequence
  Description of Artificial Sequence: Synthetic oligonucleotide
tgtggatt

SEQ ID NO: 144 - DNA, 14 bp, Artificial Sequence
  Description of Artificial Sequence: Synthetic oligonucleotide
gtaaacatgtttac

SEQ ID NO: 145 - DNA, 14 bp, Artificial Sequence
  Description of Artificial Sequence: Synthetic oligonucleotide
gtaaacaataaaca

SEQ ID NO: 146 - DNA, 10 bp, Artificial Sequence
  Description of Artificial Sequence: Synthetic oligonucleotide
tgtttactta

SEQ ID NO: 147 - DNA, 12 bp, Artificial Sequence
  Description of Artificial Sequence: Synthetic oligonucleotide
gtaaacaaacaa

SEQ ID NO: 148 - DNA, 15 bp, Artificial Sequence
  Description of Artificial Sequence: Synthetic oligonucleotide
tgttaacagaacacc

SEQ ID NO: 149 - DNA, 12 bp, Artificial Sequence
  Description of Artificial Sequence: Synthetic oligonucleotide
tgcataattaat

SEQ ID NO: 150 - DNA, 12 bp, Artificial Sequence
  Description of Artificial Sequence: Synthetic oligonucleotide
catgaatattca

SEQ ID NO: 151 - DNA, 14 bp, Artificial Sequence
  Description of Artificial Sequence: Synthetic oligonucleotide
ctttgttatgcaaa

SEQ ID NO: 152 - DNA, 9 bp, Artificial Sequence
  Description of Artificial Sequence: Synthetic oligonucleotide
tatgcaaat

SEQ ID NO: 153 - DNA, 10 bp, Artificial Sequence
  Description of Artificial Sequence: Synthetic oligonucleotide
ttagtattgt

SEQ ID NO: 154 - DNA, 12 bp, Artificial Sequence
  Description of Artificial Sequence: Synthetic oligonucleotide
gtaaatatttac

SEQ ID NO: 155 - DNA, 8 bp, Artificial Sequence
  Description of Artificial Sequence: Synthetic oligonucleotide
aatattgc

SEQ ID NO: 156 - DNA, 13 bp, Artificial Sequence
  Description of Artificial Sequence: Synthetic oligonucleotide
aggagcctttgtt

SEQ ID NO: 157 - DNA, 13 bp, Artificial Sequence
  Description of Artificial Sequence: Synthetic oligonucleotide
gatacaatgtagc

SEQ ID NO: 158 - DNA, 6 bp, Artificial Sequence
  Description of Artificial Sequence: Synthetic oligonucleotide
attgtt

SEQ ID NO: 159 - DNA, 13 bp, Artificial Sequence
  Description of Artificial Sequence: Synthetic oligonucleotide
tgaattgcattca

SEQ ID NO: 160 - DNA, 15 bp, Artificial Sequence
  Description of Artificial Sequence: Synthetic oligonucleotide
aacaattgcagtgtt

SEQ ID NO: 161 - DNA, 14 bp, Artificial Sequence
  Description of Artificial Sequence: Synthetic oligonucleotide
atcaattgcattga

SEQ ID NO: 162 - DNA, 12 bp, Artificial Sequence
  Description of Artificial Sequence: Synthetic oligonucleotide
aaagaggaagta

SEQ ID NO: 163 - DNA, 11 bp, Artificial Sequence
  Description of Artificial Sequence: Synthetic oligonucleotide
agcaggaagtg

SEQ ID NO: 164 - DNA, 7 bp, Artificial Sequence
  Description of Artificial Sequence: Synthetic oligonucleotide
cccggag

SEQ ID NO: 165 - DNA, 10 bp, Artificial Sequence
  Description of Artificial Sequence: Synthetic oligonucleotide
accggaagtg

SEQ ID NO: 166 - DNA, 15 bp, Artificial Sequence
  Description of Artificial Sequence: Synthetic oligonucleotide
gaaaataattttcca

SEQ ID NO: 167 - DNA, 9 bp, Artificial Sequence
  Description of Artificial Sequence: Synthetic oligonucleotide
ggaaaattt

SEQ ID NO: 168 - DNA, 12 bp, Artificial Sequence
  Description of Artificial Sequence: Synthetic oligonucleotide
aaagaaaaaaag

SEQ ID NO: 169 - DNA, 15 bp, Artificial Sequence
  Description of Artificial Sequence: Synthetic oligonucleotide
tttccataatggaaa

SEQ ID NO: 170 - DNA, 12 bp, Artificial Sequence
  Description of Artificial Sequence: Synthetic oligonucleotide
ccgaaaccgaaa

SEQ ID NO: 171 - DNA, 12 bp, Artificial Sequence
  Description of Artificial Sequence: Synthetic oligonucleotide
cgaaaccgaaac

SEQ ID NO: 172 - DNA, 11 bp, Artificial Sequence
  Description of Artificial Sequence: Synthetic oligonucleotide
aaagtgaaagt

SEQ ID NO: 173 - DNA, 16 bp, Artificial Sequence
  Description of Artificial Sequence: Synthetic oligonucleotide
aaagtgaaagtgaaag

SEQ ID NO: 174 - DNA, 19 bp, Artificial Sequence
  Description of Artificial Sequence: Synthetic oligonucleotide
tctatttcttcttgtgtca

SEQ ID NO: 175 - DNA, 14 bp, Artificial Sequence
  Description of Artificial Sequence: Synthetic oligonucleotide
gggtttctgttgct

SEQ ID NO: 176 - DNA, 17 bp, Artificial Sequence
  Description of Artificial Sequence: Synthetic oligonucleotide
gggggggggcggggccg

SEQ ID NO: 177 - DNA, 8 bp, Artificial Sequence
  Description of Artificial Sequence: Synthetic oligonucleotide
gggggggg

SEQ ID NO: 178 - DNA, 11 bp, Artificial Sequence
  Description of Artificial Sequence: Synthetic oligonucleotide
acgcccacgca

SEQ ID NO: 179 - DNA, 11 bp, Artificial Sequence
  Description of Artificial Sequence: Synthetic oligonucleotide
gccacgccccc

SEQ ID NO: 180 - DNA, 20 bp, Artificial Sequence
  Description of Artificial Sequence: Synthetic oligonucleotide
ggggaggaggggggggggga

SEQ ID NO: 181 - DNA, 16 bp, Artificial Sequence
  Description of Artificial Sequence: Synthetic oligonucleotide
aaaggggacaggcagg

SEQ ID NO: 182 - DNA, 19 bp, Artificial Sequence
  Description of Artificial Sequence: Synthetic oligonucleotide
tcaaaccatcctttgctgc

SEQ ID NO: 183 - DNA, 12 bp, Artificial Sequence
  Description of Artificial Sequence: Synthetic oligonucleotide
tggagagcaggg

SEQ ID NO: 184 - DNA, 17 bp, Artificial Sequence
  Description of Artificial Sequence: Synthetic oligonucleotide
ggaaggaaggaaggaag

SEQ ID NO: 185 - DNA, 23 bp, Artificial Sequence
  Description of Artificial Sequence: Synthetic oligonucleotide
cagggaaggcttcctggaggagg

SEQ ID NO: 186 - DNA, 15 bp, Artificial Sequence
  Description of Artificial Sequence: Synthetic oligonucleotide
agggaagccatttct

SEQ ID NO: 187 - DNA, 13 bp, Artificial Sequence
  Description of Artificial Sequence: Synthetic oligonucleotide
tcctttgatttgc

SEQ ID NO: 188 - DNA, 25 bp, Artificial Sequence
  Description of Artificial Sequence: Synthetic oligonucleotide
ccaattcaattattttccatttaat

SEQ ID NO: 189 - DNA, 9 bp, Artificial Sequence
  Description of Artificial Sequence: Synthetic oligonucleotide
tgctctttt

SEQ ID NO: 190 - DNA, 20 bp, Artificial Sequence
  Description of Artificial Sequence: Synthetic oligonucleotide
catactggagagaaacccta

SEQ ID NO: 191 - DNA, 22 bp, Artificial Sequence
  Description of Artificial Sequence: Synthetic oligonucleotide
acaagggagtaaggcaccatga

SEQ ID NO: 192 - DNA, 19 bp, Artificial Sequence
  Description of Artificial Sequence: Synthetic oligonucleotide
aatggaatcgaatggaatc

SEQ ID NO: 193 - DNA, 14 bp, Artificial Sequence
  Description of Artificial Sequence: Synthetic oligonucleotide
tgcttttagcctct

SEQ ID NO: 194 - DNA, 17 bp, Artificial Sequence
  Description of Artificial Sequence: Synthetic oligonucleotide
agaaaactgaagtaatc

SEQ ID NO: 195 - DNA, 13 bp, Artificial Sequence
  Description of Artificial Sequence: Synthetic oligonucleotide
tggcacggtgcca

SEQ ID NO: 196 - DNA, 10 bp, Artificial Sequence
  Description of Artificial Sequence: Synthetic oligonucleotide
ctgtcacctg

SEQ ID NO: 197 - DNA, 11 bp, Artificial Sequence
  Description of Artificial Sequence: Synthetic oligonucleotide
gctgcttctgc

SEQ ID NO: 198 - DNA, 16 bp, Artificial Sequence
  Description of Artificial Sequence: Synthetic oligonucleotide
agatggcagcagcatc

SEQ ID NO: 199 - DNA, 8 bp, Artificial Sequence
  Description of Artificial Sequence: Synthetic oligonucleotide
tgcccgca

SEQ ID NO: 200 - DNA, 15 bp, Artificial Sequence
  Description of Artificial Sequence: Synthetic oligonucleotide
gcagcagggcagtta

SEQ ID NO: 201 - DNA, 16 bp, Artificial Sequence
  Description of Artificial Sequence: Synthetic oligonucleotide
tcatgaattgggcagc

SEQ ID NO: 202 - DNA, 20 bp, Artificial Sequence
  Description of Artificial Sequence: Synthetic oligonucleotide
cctcacctaatcagttgaag

SEQ ID NO: 203 - DNA, 17 bp, Artificial Sequence
  Description of Artificial Sequence: Synthetic oligonucleotide
taataagcaggtacagc

SEQ ID NO: 204 - DNA, 17 bp, Artificial Sequence
  Description of Artificial Sequence: Synthetic oligonucleotide
ggctcagagaggttaag

SEQ ID NO: 205 - DNA, 14 bp, Artificial Sequence
  Description of Artificial Sequence: Synthetic oligonucleotide
gtttcaatatgact

SEQ ID NO: 206 - DNA, 15 bp, Artificial Sequence
  Description of Artificial Sequence: Synthetic oligonucleotide
tggttttattggtta

SEQ ID NO: 207 - DNA, 19 bp, Artificial Sequence
  Description of Artificial Sequence: Synthetic oligonucleotide
ggatcctcactggcagctg

SEQ ID NO: 208 - DNA, 18 bp, Artificial Sequence
  Description of Artificial Sequence: Synthetic oligonucleotide
tggccttaaaagctcagc

SEQ ID NO: 209 - DNA, 18 bp, Artificial Sequence
  Description of Artificial Sequence: Synthetic oligonucleotide
ctgagccatgtggggtgc

SEQ ID NO: 210 - DNA, 18 bp, Artificial Sequence
  Description of Artificial Sequence: Synthetic oligonucleotide
acccagcaattccgctcc

SEQ ID NO: 211 - DNA, 11 bp, Artificial Sequence
  Description of Artificial Sequence: Synthetic oligonucleotide
ccaggcctcgg

SEQ ID NO: 212 - DNA, 11 bp, Artificial Sequence
  Description of Artificial Sequence: Synthetic oligonucleotide
aaaatggcggc

SEQ ID NO: 213 - DNA, 12 bp, Artificial Sequence
  Description of Artificial Sequence: Synthetic oligonucleotide
ggtgctggagcc

SEQ ID NO: 214 - DNA, 11 bp, Artificial Sequence
  Description of Artificial Sequence: Synthetic oligonucleotide
tgtctggcacc

SEQ ID NO: 215 - DNA, 14 bp, Artificial Sequence
  Description of Artificial Sequence: Synthetic oligonucleotide
gtctggcatttgtc

SEQ ID NO: 216 - DNA, 11 bp, Artificial Sequence
  Description of Artificial Sequence: Synthetic oligonucleotide
ggttagagacc

SEQ ID NO: 217 - DNA, 11 bp, Artificial Sequence
  Description of Artificial Sequence: Synthetic oligonucleotide
agggtaacagc

SEQ ID NO: 218 - DNA, 18 bp, Artificial Sequence
  Description of Artificial Sequence: Synthetic oligonucleotide
cagcaccatggacagcgc

SEQ ID NO: 219 - DNA, 17 bp, Artificial Sequence
  Description of Artificial Sequence: Synthetic oligonucleotide
agcctggtacagagcct

SEQ ID NO: 220 - DNA, 20 bp, Artificial Sequence
  Description of Artificial Sequence: Synthetic oligonucleotide
gctgtcctcggcgctgcctg

SEQ ID NO: 221 - DNA, 21 bp, Artificial Sequence
  Description of Artificial Sequence: Synthetic oligonucleotide
tagggtctgtagtgatgtctc

SEQ ID NO: 222 - DNA, 12 bp, Artificial Sequence
  Description of Artificial Sequence: Synthetic oligonucleotide
aatctcgcgaga

SEQ ID NO: 223 - DNA, 8 bp, Artificial Sequence
  Description of Artificial Sequence: Synthetic oligonucleotide
ggcgggaa

SEQ ID NO: 224 - DNA, 12 bp, Artificial Sequence
  Description of Artificial Sequence: Synthetic oligonucleotide
tttcccgccaaa

SEQ ID NO: 225 - DNA, 8 bp, Artificial Sequence
  Description of Artificial Sequence: Synthetic oligonucleotide
gcgccaaa

SEQ ID NO: 226 - DNA, 12 bp, Artificial Sequence
  Description of Artificial Sequence: Synthetic oligonucleotide
aagggaaattcc

SEQ ID NO: 227 - DNA, 10 bp, Artificial Sequence
  Description of Artificial Sequence: Synthetic oligonucleotide
ggaaatcccc

SEQ ID NO: 228 - DNA, 11 bp, Artificial Sequence
  Description of Artificial Sequence: Synthetic oligonucleotide
ggggaatcccc

SEQ ID NO: 229 - DNA, 7 bp, Artificial Sequence
  Description of Artificial Sequence: Synthetic oligonucleotide
ggggaat

SEQ ID NO: 230 - DNA, 14 bp, Artificial Sequence
  Description of Artificial Sequence: Synthetic oligonucleotide
tttcccacaacacg

SEQ ID NO: 231 - DNA, 10 bp, Artificial Sequence
  Description of Artificial Sequence: Synthetic oligonucleotide
ttccccacac

SEQ ID NO: 232 - DNA, 9 bp, Artificial Sequence
  Description of Artificial Sequence: Synthetic oligonucleotide
gtgggaaaa

SEQ ID NO: 233 - DNA, 13 bp, Artificial Sequence
  Description of Artificial Sequence: Synthetic oligonucleotide
acattccaggcat

SEQ ID NO: 234 - DNA, 10 bp, Artificial Sequence
  Description of Artificial Sequence: Synthetic oligonucleotide
ttctcaggaa

SEQ ID NO: 235 - DNA, 12 bp, Artificial Sequence
  Description of Artificial Sequence: Synthetic oligonucleotide
tttccatggaaa

SEQ ID NO: 236 - DNA, 16 bp, Artificial Sequence
  Description of Artificial Sequence: Synthetic oligonucleotide
tgctttctaggaattc

SEQ ID NO: 237 - DNA, 11 bp, Artificial Sequence
  Description of Artificial Sequence: Synthetic oligonucleotide
ctttctaggaa

SEQ ID NO: 238 - DNA, 9 bp, Artificial Sequence
  Description of Artificial Sequence: Synthetic oligonucleotide
ttccaggaa

SEQ ID NO: 239 - DNA, 14 bp, Artificial Sequence
  Description of Artificial Sequence: Synthetic oligonucleotide
acccacaatgcatt

SEQ ID NO: 240 - DNA, 19 bp, Artificial Sequence
  Description of Artificial Sequence: Synthetic oligonucleotide
gcatgctgggagttgtagt

SEQ ID NO: 241 - DNA, 10 bp, Artificial Sequence
  Description of Artificial Sequence: Synthetic oligonucleotide
tcccaaggga

SEQ ID NO: 242 - DNA, 9 bp, Artificial Sequence
  Description of Artificial Sequence: Synthetic oligonucleotide
tagggaccg

SEQ ID NO: 243 - DNA, 8 bp, Artificial Sequence
  Description of Artificial Sequence: Synthetic oligonucleotide
cccagggg

SEQ ID NO: 244 - DNA, 14 bp, Artificial Sequence
  Description of Artificial Sequence: Synthetic oligonucleotide
gcacccaggggtgc

SEQ ID NO: 245 - DNA, 14 bp, Artificial Sequence
  Description of Artificial Sequence: Synthetic oligonucleotide
accgcaaaaaccgc

SEQ ID NO: 246 - DNA, 10 bp, Artificial Sequence
  Description of Artificial Sequence: Synthetic oligonucleotide
gtctgtggtt

SEQ ID NO: 247 - DNA, 11 bp, Artificial Sequence
  Description of Artificial Sequence: Synthetic oligonucleotide
gaaacctgata

SEQ ID NO: 248 - DNA, 8 bp, Artificial Sequence
  Description of Artificial Sequence: Synthetic oligonucleotide
ctgtgatt

SEQ ID NO: 249 - DNA, 9 bp, Artificial Sequence
  Description of Artificial Sequence: Synthetic oligonucleotide
tataaaagg

SEQ ID NO: 250 - DNA, 10 bp, Artificial Sequence
  Description of Artificial Sequence: Synthetic oligonucleotide
ctatttttag

SEQ ID NO: 251 - DNA, 13 bp, Artificial Sequence
  Description of Artificial Sequence: Synthetic oligonucleotide
accatatatggtc

SEQ ID NO: 252 - DNA, 6 bp, Artificial Sequence
  Description of Artificial Sequence: Synthetic oligonucleotide
ccttat

SEQ ID NO: 253 - DNA, 14 bp, Artificial Sequence
  Description of Artificial Sequence: Synthetic oligonucleotide
aaatggcgccaaaa

SEQ ID NO: 254 - DNA, 14 bp, Artificial Sequence
  Description of Artificial Sequence: Synthetic oligonucleotide
tgccaacctatgcc

SEQ ID NO: 255 - DNA, 6 bp, Artificial Sequence
  Description of Artificial Sequence: Synthetic oligonucleotide
tgccaa

SEQ ID NO: 256 - DNA, 14 bp, Artificial Sequence
  Description of Artificial Sequence: Synthetic oligonucleotide
ttggcacggtgcca

SEQ ID NO: 257 - DNA, 16 bp, Artificial Sequence
  Description of Artificial Sequence: Synthetic oligonucleotide
aacaatgtgcagtgtt

SEQ ID NO: 258 - DNA, 16 bp, Artificial Sequence
  Description of Artificial Sequence: Synthetic oligonucleotide
atcaatgtgcagtgat

SEQ ID NO: 259 - DNA, 11 bp, Artificial Sequence
  Description of Artificial Sequence: Synthetic oligonucleotide
tgcgcatgcgc

SEQ ID NO: 260 - DNA, 7 bp, Artificial Sequence
  Description of Artificial Sequence: Synthetic oligonucleotide
gaaaaaa

SEQ ID NO: 261 - DNA, 7 bp, Artificial Sequence
  Description of Artificial Sequence: Synthetic oligonucleotide
aaaaaaa

SEQ ID NO: 262 - DNA, 10 bp, Artificial Sequence
  Description of Artificial Sequence: Synthetic oligonucleotide
aaacgattat

SEQ ID NO: 263 - DNA, 15 bp, Artificial Sequence
  Description of Artificial Sequence: Synthetic oligonucleotide
aaacgaaaatcgatt

SEQ ID NO: 264 - DNA, 20 bp, Artificial Sequence
  Description of Artificial Sequence: Synthetic oligonucleotide
aggcctaggaggaaaaaatg

SEQ ID NO: 265 - DNA, 11 bp, Artificial Sequence
  Description of Artificial Sequence: Synthetic oligonucleotide
attcattcatt

SEQ ID NO: 266 - DNA, 8 bp, Artificial Sequence
  Description of Artificial Sequence: Synthetic oligonucleotide
taggggga

SEQ ID NO: 267 - DNA, 15 bp, Artificial Sequence
  Description of Artificial Sequence: Synthetic oligonucleotide
cccgcatacaacgaa

SEQ ID NO: 268 - DNA, 11 bp, Artificial Sequence
  Description of Artificial Sequence: Synthetic oligonucleotide
atgcgggtacc

SEQ ID NO: 269 - DNA, 14 bp, Artificial Sequence
  Description of Artificial Sequence: Synthetic oligonucleotide
tgaatgtgcagtca

SEQ ID NO: 270 - DNA, 10 bp, Artificial Sequence
  Description of Artificial Sequence: Synthetic oligonucleotide
cggacacaat

SEQ ID NO: 271 - DNA, 10 bp, Artificial Sequence
  Description of Artificial Sequence: Synthetic oligonucleotide
tacatgacat

SEQ ID NO: 272 - DNA, 9 bp, Artificial Sequence
  Description of Artificial Sequence: Synthetic oligonucleotide
cgctgtaaa

SEQ ID NO: 273 - DNA, 14 bp, Artificial Sequence
  Description of Artificial Sequence: Synthetic oligonucleotide
tttgcacacggcac

SEQ ID NO: 274 - DNA, 8 bp, Artificial Sequence
  Description of Artificial Sequence: Synthetic oligonucleotide
gtctagac

SEQ ID NO: 275 - DNA, 22 bp, Artificial Sequence
  Description of Artificial Sequence: Synthetic oligonucleotide
tttcatggctgcatagtattcc

SEQ ID NO: 276 - DNA, 14 bp, Artificial Sequence
  Description of Artificial Sequence: Synthetic oligonucleotide
tcgaaacgttcgaa

SEQ ID NO: 277 - DNA, 8 bp, Artificial Sequence
  Description of Artificial Sequence: Synthetic oligonucleotide
ctagttaa

SEQ ID NO: 278 - DNA, 13 bp, Artificial Sequence
  Description of Artificial Sequence: Synthetic oligonucleotide
tggtcccggatca

SEQ ID NO: 279 - DNA, 14 bp, Artificial Sequence
  Description of Artificial Sequence: Synthetic oligonucleotide
cagaaagaagtaaa

SEQ ID NO: 280 - DNA, 11 bp, Artificial Sequence
  Description of Artificial Sequence: Synthetic oligonucleotide
ccctcgaaccc

SEQ ID NO: 281 - DNA, 7 bp, Artificial Sequence
  Description of Artificial Sequence: Synthetic oligonucleotide
tgtatca

SEQ ID NO: 282 - DNA, 9 bp, Artificial Sequence
  Description of Artificial Sequence: Synthetic oligonucleotide
tgcaatccc

SEQ ID NO: 283 - DNA, 6 bp, Artificial Sequence
  Description of Artificial Sequence: Synthetic oligonucleotide
aagctt

SEQ ID NO: 284 - DNA, 8 bp, Artificial Sequence
  Description of Artificial Sequence: Synthetic oligonucleotide
gagcgcgc

SEQ ID NO: 285 - DNA, 7 bp, Artificial Sequence
  Description of Artificial Sequence: Synthetic oligonucleotide
tgcggca

SEQ ID NO: 286 - DNA, 18 bp, Artificial Sequence
  Description of Artificial Sequence: Synthetic oligonucleotide
accatgctgttttgatta

SEQ ID NO: 287 - DNA, 21 bp, Artificial Sequence
  Description of Artificial Sequence: Synthetic oligonucleotide
gggtctcttgaaggcagcata

SEQ ID NO: 288 - DNA, 6 bp, Artificial Sequence
  Description of Artificial Sequence: Synthetic oligonucleotide
atccac

SEQ ID NO: 289 - DNA, 10 bp, Artificial Sequence
  Description of Artificial Sequence: Synthetic oligonucleotide
gtacctacct

SEQ ID NO: 290 - DNA, 13 bp, Artificial Sequence
  Description of Artificial Sequence: Synthetic oligonucleotide
acgtaaccacgta

SEQ ID NO: 291 - DNA, 7 bp, Artificial Sequence
  Description of Artificial Sequence: Synthetic oligonucleotide
tttgaat

SEQ ID NO: 292 - DNA, 13 bp, Artificial Sequence
  Description of Artificial Sequence: Synthetic oligonucleotide
tttcaaggccccc

SEQ ID NO: 293 - DNA, 16 bp, Artificial Sequence
  Description of Artificial Sequence: Synthetic oligonucleotide
tttcgcctggcacgtc

SEQ ID NO: 294 - DNA, 22 bp, Artificial Sequence
  Description of Artificial Sequence: Synthetic oligonucleotide
gctggatatagtattcttggtt

SEQ ID NO: 295 - DNA, 16 bp, Artificial Sequence
  Description of Artificial Sequence: Synthetic oligonucleotide
accaacctaagacagg

SEQ ID NO: 296 - DNA, 12 bp, Artificial Sequence
  Description of Artificial Sequence: Synthetic oligonucleotide
ggtctagcctcg

SEQ ID NO: 297 - DNA, 16 bp, Artificial Sequence
  Description of Artificial Sequence: Synthetic oligonucleotide
agaaaaatgccacgaa

SEQ ID NO: 298 - DNA, 21 bp, Artificial Sequence
  Description of Artificial Sequence: Synthetic oligonucleotide
gtggtatatccatacaatgga

SEQ ID NO: 299 - DNA, 10 bp, Artificial Sequence
  Description of Artificial Sequence: Synthetic oligonucleotide
aaagggttaa

SEQ ID NO: 300 - DNA, 17 bp, Artificial Sequence
  Description of Artificial Sequence: Synthetic oligonucleotide
acatgtctatgacatgt

SEQ ID NO: 301 - DNA, 18 bp, Artificial Sequence
  Description of Artificial Sequence: Synthetic oligonucleotide
acatgtccatggacatgt

SEQ ID NO: 302 - DNA, 16 bp, Artificial Sequence
  Description of Artificial Sequence: Synthetic oligonucleotide
gttaaatgtagattaa

SEQ ID NO: 303 - DNA, 12 bp, Artificial Sequence
  Description of Artificial Sequence: Synthetic oligonucleotide
catcccataata

SEQ ID NO: 304 - DNA, 11 bp, Artificial Sequence
  Description of Artificial Sequence: Synthetic oligonucleotide
tatcgcgacat

SEQ ID NO: 305 - DNA, 10 bp, Artificial Sequence
  Description of Artificial Sequence: Synthetic oligonucleotide
aagacgcctt

SEQ ID NO: 306 - DNA, 9 bp, Artificial Sequence
  Description of Artificial Sequence: Synthetic oligonucleotide
gggccggag

SEQ ID NO: 307 - DNA, 9 bp, Artificial Sequence
  Description of Artificial Sequence: Synthetic oligonucleotide
tgtaactgt

SEQ ID NO: 308 - DNA, 13 bp, Artificial Sequence
  Description of Artificial Sequence: Synthetic oligonucleotide
agataagataaga

SEQ ID NO: 309 - DNA, 10 bp, Artificial Sequence
  Description of Artificial Sequence: Synthetic oligonucleotide
cttatctgtc

SEQ ID NO: 310 - DNA, 7 bp, Artificial Sequence
  Description of Artificial Sequence: Synthetic oligonucleotide
ggttgcc

SEQ ID NO: 311 - DNA, 19 bp, Artificial Sequence
  Description of Artificial Sequence: Synthetic oligonucleotide
ctgggcaacatagcaagac

SEQ ID NO: 312 - DNA, 13 bp, Artificial Sequence
  Description of Artificial Sequence: Synthetic oligonucleotide
gttgctaggcaac

SEQ ID NO: 313 - DNA, 13 bp, Artificial Sequence
  Description of Artificial Sequence: Synthetic oligonucleotide
gctgttgccaggc

SEQ ID NO: 314 - DNA, 14 bp, Artificial Sequence
  Description of Artificial Sequence: Synthetic oligonucleotide
gttgccatggcaac

SEQ ID NO: 315 - DNA, 14 bp, Artificial Sequence
  Description of Artificial Sequence: Synthetic oligonucleotide
gaacattgtgttcc

SEQ ID NO: 316 - DNA, 13 bp, Artificial Sequence
  Description of Artificial Sequence: Synthetic oligonucleotide
ttctagaacgttc

SEQ ID NO: 317 - DNA, 10 bp, Artificial Sequence
  Description of Artificial Sequence: Synthetic oligonucleotide
caagaagaat

SEQ ID NO: 318 - DNA, 19 bp, Artificial Sequence
  Description of Artificial Sequence: Synthetic oligonucleotide
atgtccaagaagaatgagg

SEQ ID NO: 319 - DNA, 8 bp, Artificial Sequence
  Description of Artificial Sequence: Synthetic oligonucleotide
ggcagttg

SEQ ID NO: 320 - DNA, 11 bp, Artificial Sequence
  Description of Artificial Sequence: Synthetic oligonucleotide
accgttaacgg

SEQ ID NO: 321 - DNA, 14 bp, Artificial Sequence
  Description of Artificial Sequence: Synthetic oligonucleotide
ccgttaaaaccgtt

SEQ ID NO: 322 - DNA, 12 bp, Artificial Sequence
  Description of Artificial Sequence: Synthetic oligonucleotide
accgttaaacgg

SEQ ID NO: 323 - DNA, 8 bp, Artificial Sequence
  Description of Artificial Sequence: Synthetic oligonucleotide
aaccgtta

SEQ ID NO: 324 - DNA, 16 bp, Artificial Sequence
  Description of Artificial Sequence: Synthetic oligonucleotide
acatgcccagacatgc

SEQ ID NO: 325 - DNA, 12 bp, Artificial Sequence
  Description of Artificial Sequence: Synthetic oligonucleotide
gaaaaaccggtt

SEQ ID NO: 326 - DNA, 15 bp, Artificial Sequence
  Description of Artificial Sequence: Synthetic oligonucleotide
ccggttcaaaccggt

SEQ ID NO: 327 - DNA, 20 bp, Artificial Sequence
  Description of Artificial Sequence: Synthetic oligonucleotide
ctggatccagccatgcctga

SEQ ID NO: 328 - DNA, 14 bp, Artificial Sequence
  Description of Artificial Sequence: Synthetic oligonucleotide
gaccccccacgaag

SEQ ID NO: 329 - DNA, 10 bp, Artificial Sequence
  Description of Artificial Sequence: Synthetic oligonucleotide
tcggtggtcg

SEQ ID NO: 330 - DNA, 11 bp, Artificial Sequence
  Description of Artificial Sequence: Synthetic oligonucleotide
gccctgagggc

SEQ ID NO: 331 - DNA, 9 bp, Artificial Sequence
  Description of Artificial Sequence: Synthetic oligonucleotide
gcctgaggc

SEQ ID NO: 332 - DNA, 14 bp, Artificial Sequence
  Description of Artificial Sequence: Synthetic oligonucleotide
ccaccagggggcgc

SEQ ID NO: 333 - DNA, 12 bp, Artificial Sequence
  Description of Artificial Sequence: Synthetic oligonucleotide
tgtcagggggca

SEQ ID NO: 334 - DNA, 7 bp, Artificial Sequence
  Description of Artificial Sequence: Synthetic oligonucleotide
ggggtct

SEQ ID NO: 335 - DNA, 14 bp, Artificial Sequence
  Description of Artificial Sequence: Synthetic oligonucleotide
ggggcccaaggggg

SEQ ID NO: 336 - DNA, 19 bp, Artificial Sequence
  Description of Artificial Sequence: Synthetic oligonucleotide
gtgggaccagggggccagt

SEQ ID NO: 337 - DNA, 19 bp, Artificial Sequence
  Description of Artificial Sequence: Synthetic oligonucleotide
ggctgggctcagctgggtg

SEQ ID NO: 338 - DNA, 9 bp, Artificial Sequence
  Description of Artificial Sequence: Synthetic oligonucleotide
ggttgggct

SEQ ID NO: 339 - DNA, 14 bp, Artificial Sequence
  Description of Artificial Sequence: Synthetic oligonucleotide
ggacctactgtgtg

SEQ ID NO: 340 - DNA, 13 bp, Artificial Sequence
  Description of Artificial Sequence: Synthetic oligonucleotide
accccccgctgtg

SEQ ID NO: 341 - DNA, 10 bp, Artificial Sequence
  Description of Artificial Sequence: Synthetic oligonucleotide
aacgtccgcg

SEQ ID NO: 342 - DNA, 20 bp, Artificial Sequence
  Description of Artificial Sequence: Synthetic oligonucleotide
gcggacgttgcaacgtccgc

SEQ ID NO: 343 - DNA, 19 bp, Artificial Sequence
  Description of Artificial Sequence: Synthetic oligonucleotide
gcggacgttcaacgtccgc

SEQ ID NO: 344 - DNA, 7 bp, Artificial Sequence
  Description of Artificial Sequence: Synthetic oligonucleotide
tacgtaa

SEQ ID NO: 345 - DNA, 14 bp, Artificial Sequence
  Description of Artificial Sequence: Synthetic oligonucleotide
acgtaactgacgta

SEQ ID NO: 346 - DNA, 12 bp, Artificial Sequence
  Description of Artificial Sequence: Synthetic oligonucleotide
aatgacacagcg

SEQ ID NO: 347 - DNA, 13 bp, Artificial Sequence
  Description of Artificial Sequence: Synthetic oligonucleotide
atagggtatcact

SEQ ID NO: 348 - DNA, 14 bp, Artificial Sequence
  Description of Artificial Sequence: Synthetic oligonucleotide
gtcacgcatgactg

SEQ ID NO: 349 - DNA, 17 bp, Artificial Sequence
  Description of Artificial Sequence: Synthetic oligonucleotide
gggcagcagagcgtgac

SEQ ID NO: 350 - DNA, 6 bp, Artificial Sequence
  Description of Artificial Sequence: Synthetic oligonucleotide
gtcacg

SEQ ID NO: 351 - DNA, 6 bp, Artificial Sequence
  Description of Artificial Sequence: Synthetic oligonucleotide
tgcgtg

SEQ ID NO: 352 - DNA, 9 bp, Artificial Sequence
  Description of Artificial Sequence: Synthetic oligonucleotide
cagggggtg

SEQ ID NO: 353 - DNA, 13 bp, Artificial Sequence
  Description of Artificial Sequence: Synthetic oligonucleotide
gcacacactgaaa

SEQ ID NO: 354 - DNA, 24 bp, Artificial Sequence
  Description of Artificial Sequence: Synthetic oligonucleotide
aacccggaagtgaacccggaagtg

SEQ ID NO: 355 - DNA, 24 bp, Artificial Sequence
  Description of Artificial Sequence: Synthetic oligonucleotide
gcactttgtacagggtgccatcgg

SEQ ID NO: 356 - DNA, 24 bp, Artificial Sequence
  Description of Artificial Sequence: Synthetic oligonucleotide
gtttctgaactctcagatagtggg

SEQ ID NO: 357 - DNA, 24 bp, Artificial Sequence
  Description of Artificial Sequence: Synthetic oligonucleotide
gcggtccaacttaggcgtaaacct

SEQ ID NO: 358 - DNA, 24 bp, Artificial Sequence
  Description of Artificial Sequence: Synthetic oligonucleotide
cgatgctacctactcagacccacc

SEQ ID NO: 359 - DNA, 24 bp, Artificial Sequence
  Description of Artificial Sequence: Synthetic oligonucleotide
atcccagctggttcttggcgttct

SEQ ID NO: 360 - DNA, 12 bp, Artificial Sequence
  Description of Artificial Sequence: Synthetic oligonucleotide
bacccggaagtg

SEQ ID NO: 361 - DNA, 12 bp, Artificial Sequence
  Description of Artificial Sequence: Synthetic oligonucleotide
abcccggaagtg

SEQ ID NO: 362 - DNA, 12 bp, Artificial Sequence
  Description of Artificial Sequence: Synthetic oligonucleotide
aadccggaagtg

SEQ ID NO: 363 - DNA, 12 bp, Artificial Sequence
  Description of Artificial Sequence: Synthetic oligonucleotide
aacdcggaagtg

SEQ ID NO: 364 - DNA, 12 bp, Artificial Sequence
  Description of Artificial Sequence: Synthetic oligonucleotide
aaccdggaagtg

SEQ ID NO: 365 - DNA, 12 bp, Artificial Sequence
  Description of Artificial Sequence: Synthetic oligonucleotide
aaccchgaagtg

SEQ ID NO: 366 - DNA, 12 bp, Artificial Sequence
  Description of Artificial Sequence: Synthetic oligonucleotide
aacccghaagtg

SEQ ID NO: 367 - DNA, 12 bp, Artificial Sequence
  Description of Artificial Sequence: Synthetic oligonucleotide
aacccggbagtg

SEQ ID NO: 368 - DNA, 12 bp, Artificial Sequence
  Description of Artificial Sequence: Synthetic oligonucleotide
aacccggabgtg

SEQ ID NO: 369 - DNA, 12 bp, Artificial Sequence
  Description of Artificial Sequence: Synthetic oligonucleotide
aacccggaahtg

SEQ ID NO: 370 - DNA, 12 bp, Artificial Sequence
  Description of Artificial Sequence: Synthetic oligonucleotide
aacccggaagvg

SEQ ID NO: 371 - DNA, 12 bp, Artificial Sequence
  Description of Artificial Sequence: Synthetic oligonucleotide
aacccggaagth

SEQ ID NO: 372 - protein, 1401 aa, Streptococcus pyogenes
MDKKYSIGLDIGTNSVGWAVITDEYKVPSKKFKVLGNTDRHSIKKNLIGALLFDSGETAEATRLKRTARRRYTRRKNRICYLQEIFSNEMAKVDDSFFHRLEESFLVEEDKKHERHPIFGNIVDEVAYHEKYPTIYHLRKKLVDSTDKADLRLIYLALAHMIKFRGHFLIEGDLNPDNSDVDKLFIQLVQTYNQLFEENPINASGVDAKAILSARLSKSRRLENLIAQLPGEKKNGLFGNLIALSLGLTPNFKSNFDLAEDAKLQLSKDTYDDDLDNLLAQIGDQYADLFLAAKNLSDAILLSDILRVNTEITKAPLSASMIKRYDEHHQDLTLLKALVRQQLPEKYKEIFFDQSKNGYAGYIDGGASQEEFYKFIKPILEKMDGTEELLVKLNREDLLRKQRTFDNGSIPHQIHLGELHAILRRQEDFYPFLKDNREKIEKILTFRIPYYVGPLARGNSRFAWMTRKSEETITPWNFEEVVDKGASAQSFIERMTNFDKNLPNEKVLPKHSLLYEYFTVYNELTKVKYVTEGMRKPAFLSGEQKKAIVDLLFKTNRKVTVKQLKEDYFKKIECFDSVEISGVEDRFNASLGTYHDLLKIIKDKDFLDNEENEDILEDIVLTLTLFEDREMIEERLKTYAHLFDDKVMKQLKRRRYTGWGRLSRKLINGIRDKQSGKTILDFLKSDGFANRNFMQLIHDDSLTFKEDIQKAQVSGQGDSLHEHIANLAGSPAIKKGILQTVKVVDELVKVMGRHKPENIVIEMARENQTTQKGQKNSRERMKRIEEGIKELGSQILKEHPVENTQLQNEKLYLYYLQNGRDMYVDQELDINRLSDYDVDHIVPQSFLKDDSIDNKVLTRSDKNRGKSDNVPSEEVVKKMKNYWRQLLNAKLITQRKFDNLTKAERGGLSELDKAGFIKRQLVETRQITKHVAQILDSRMNTKYDENDKLIREVKVITLKSKLVSDFRKDFQFYKVREINNYHHAHDAYLNAVVGTALIKKYPKLESEFVYGDYKVYDVRKMIAKSEQEIGKATAKYFFYSNIMNFFKTEITLANGEIRKRPLIETNGETGEIVWDKGRDFATVRKVLSMPQVNIVKKTEVQTGGFSKESILPKRNSDKLIARKKDWDPKKYGGFDSPTVAYSVLVVAKVEKGKSKKLKSVKELLGITIMERSSFEKNPIDFLEAKGYKEVKKDLIIKLPKYSLFELENGRKRMLASAGELQKGNELALPSKYVNFLYLASHYEKLKGSPEDNEQKQLFVEQHKHYLDEIIEQISEFSKRVILADANLDKVLSAYNKHRDKPIREQAENIIHLFTLTNLGAPAAFKYFDTTIDRKRYTSTKEVLDATLIHQSITGLYETRIDLSQLGGDGSPKKKRKVSSDYKDHDGDYKDHDIDYKDDDDK

SEQ ID NO: 373 - protein, 1368 aa, Artificial Sequence
  Description of Artificial Sequence: Synthetic polypeptide
MDKKYSIGLAIGTNSVGWAVITDEYKVPSKKFKVLGNTDRHSIKKNLIGALLFDSGETAERTRLKRTARRRYTRRKNRICYLQEIFSNEMAKVDDSFFHRLEESFLVEEDKKHERHPIFGNIVDEVAYHEKYPTIYHLRKKLVDSTDKADLRLIYLALAHMIKFRGHFLIEGDLNPDNSDVDKLFIQLVQTYNQLFEENPINASGVDAKAILSARLSKSRRLENLIAQLPGEKKNGLFGNLIALSLGLTPNFKSNFDLAEDAKLQLSKDTYDDDLDNLLAQIGDQYADLFLAAKNLSDAILLSDILRVNTEITKAPLSASMIKRYDEHHQDLTLLKALVRQQLPEKYKEIFFDQSKNGYAGYIDGGASQEEFYKFIKPILEKMDGTEELLVKLNREDLLRKQRTFDNGSIPHQIHLGELHAILRRQEDFYPFLKDNREKIEKILTFRIPYYVGPLARGNSRFAWMTRKSEETITPWNFEEVVDKGASAQSFIERMTNFDKNLPNEKVLPKHSLLYEYFTVYNELTKVKYVTEGMRKPAFLSGEQKKAIVDLLFKTNRKVTVKQLKEDYFKKIECFDSVEISGVEDRFNASLGTYHDLLKIIKDKDFLDNEENEDILEDIVLTLTLFEDREMIEERLKTYAHLFDDKVMKQLKRRRYTGWGRLSRKLINGIRDKQSGKTILDFLKSDGFANRNFMQLIHDDSLTFKEDIQKAQVSGQGDSLHEHIANLAGSPAIKKGILQTVKVVDELVKVMGRHKPENIVIEMARENQTTQKGQKNSRERMKRIEEGIKELGSQILKEHPVENTQLQNEKLYLYYLQNGRDMYVDQELDINRLSDYDVDHIVPQSFLKDDSIDNKVLTRSDKNRGKSDNVPSEEVVKKMKNYWRQLLNAKLITQRKFDNLTKAERGGLSELDKAGFIKRQLVETRQITKHVAQILDSRMNTKYDENDKLIREVKVITLKSKLVSDFRKDFQFYKVREINNYHHAHDAYLNAVVGTALIKKYPKLESEFVYGDYKVYDVRKMIAKSEQEIGKATAKYFFYSNIMNFFKTEITLANGEIRKRPLIETNGETGEIVWDKGRDFATVRKVLSMPQVNIVKKTEVQTGGFSKESIRPKRNSDKLIARKKDWDPKKYGGFLWPTVAYSVLVVAKVEKGKSKKLKSVKELLGITIMERSSFEKNPIDFLEAKGYKEVKKDLIIKLPKYSLFELENGRKRMLASAKQLQKGNELALPSKYVNFLYLASHYEKLKGSPEDNEQKQLFVEQHKHYLDEIIEQISEFSKRVILADANLDKVLSAYNKHRDKPIREQAENIIHLFTLTRLGAPRAFKYFDTTIDPKQYRSTKEVLDATLIHQSITGLYETRIDLSQLGGD

SEQ ID NO: 374 - protein, 1368 aa, Artificial Sequence
  Description of Artificial Sequence: Synthetic polypeptide
MDKKYSIGLAIGTNSVGWAVITDEYKVPSKKFKVLGNTDRHSIKKNLIGALLFDSGETAEATRLKRTARRRYTRRKNRICYLQEIFSNEMAKVDDSFFHRLEESFLVEEDKKHERHPIFGNIVDEVAYHEKYPTIYHLRKKLVDSTDKADLRLIYLALAHMIKFRGHFLIEGDLNPDNSDVDKLFIQLVQTYNQLFEENPINASGVDAKAILSARLSKSRRLENLIAQLPGEKKNGLFGNLIALSLGLTPNFKSNFDLAEDAKLQLSKDTYDDDLDNLLAQIGDQYADLFLAAKNLSDAILLSDILRVNTEITKAPLSASMIKRYDEHHQDLTLLKALVRQQLPEKYKEIFFDQSKNGYAGYIDGGASQEEFYKFIKPILEKMDGTEELLVKLNREDLLRKQRTFDNGSIPHQIHLGELHAILRRQEDFYPFLKDNREKIEKILTFRIPYYVGPLARGNSRFAWMTRKSEETITPWNFEEVVDKGASAQSFIERMTNFDKNLPNEKVLPKHSLLYEYFTVYNELTKVKYVTEGMRKPAFLSGEQKKAIVDLLFKTNRKVTVKQLKEDYFKKIECFDSVEISGVEDRFNASLGTYHDLLKIIKDKDFLDNEENEDILEDIVLTLTLFEDREMIEERLKTYAHLFDDKVMKQLKRRRYTGWGRLSRKLINGIRDKQSGKTILDFLKSDGFANRNFMQLIHDDSLTFKEDIQKAQVSGQGDSLHEHIANLAGSPAIKKGILQTVKVVDELVKVMGRHKPENIVIEMARENQTTQKGQKNSRERMKRIEEGIKELGSQILKEHPVENTQLQNEKLYLYYLQNGRDMYVDQELDINRLSDYDVDHIVPQSFLKDDSIDNKVLTRSDKNRGKSDNVPSEEVVKKMKNYWRQLLNAKLITQRKFDNLTKAERGGLSELDKAGFIKRQLVETRQITKHVAQILDSRMNTKYDENDKLIREVKVITLKSKLVSDFRKDFQFYKVREINNYHHAHDAYLNAVVGTALIKKYPKLESEFVYGDYKVYDVRKMIAKSEQEIGKATAKYFFYSNIMNFFKTEITLANGEIRKRPLIETNGETGEIVWDKGRDFATVRKVLSMPQVNIVKKTEVQTGGFSKESILPKRNSDKLIARKKDWDPKKYGGFLWPTVAYSVLVVAKVEKGKSKKLKSVKELLGITIMERSSFEKNPIDFLEAKGYKEVKKDLIIKLPKYSLFELENGRKRMLASAKQLQKGNELALPSKYVNFLYLASHYEKLKGSPEDNEQKQLFVEQHKHYLDEIIEQISEFSKRVILADANLDKVLSAYNKHRDKPIREQAENIIHLFTLTNLGAPAAFKYFDTTIDRKQYRSTKEVLDATLIHQSITGLYETRIDLSQLGGD

SEQ ID NO: 375 - protein, 1623 aa, Artificial Sequence
  Description of Artificial Sequence: Synthetic polypeptide
MSSETGPVAVDPTLRRRIEPHEFEVFFDPRELRKETCLLYEINWGGRHSIWRHTSQNTNKHVEVNFIEKFTTERYFCPNTRCSITWFLSWSPCGECSRAITEFLSRYPHVTLFIYIARLYHHADPRNRQGLRDLISSGVTIQIMTEQESGYCWRNFVNYSPSNEAHWPRYPHLWVRLYVLELYCIILGLPPCLNILRRKQPQLTFFTIALQSCHYQRLPPHILWATGLKSGSETPGTSESATPESDKKYSIGLAIGTNSVGWAVITDEYKVPSKKFKVLGNTDRHSIKKNLIGALLFDSGETAEATRLKRTARRRYTRRKNRICYLQEIFSNEMAKVDDSFFHRLEESFLVEEDKKHERHPIFGNIVDEVAYHEKYPTIYHLRKKLVDSTDKADLRLIYLALAHMIKFRGHFLIEGDLNPDNSDVDKLFIQLVQTYNQLFEENPINASGVDAKAILSARLSKSRRLENLIAQLPGEKKNGLFGNLIALSLGLTPNFKSNFDLAEDAKLQLSKDTYDDDLDNLLAQIGDQYADLFLAAKNLSDAILLSDILRVNTEITKAPLSASMIKRYDEHHQDLTLLKALVRQQLPEKYKEIFFDQSKNGYAGYIDGGASQEEFYKFIKPILEKMDGTEELLVKLNREDLLRKQRTFDNGSIPHQIHLGELHAILRRQEDFYPFLKDNREKIEKILTFRIPYYVGPLARGNSRFAWMTRKSEETITPWNFEEVVDKGASAQSFIERMTNFDKNLPNEKVLPKHSLLYEYFTVYNELTKVKYVTEGMRKPAFLSGEQKKAIVDLLFKTNRKVTVKQLKEDYFKKIECFDSVEISGVEDRFNASLGTYHDLLKIIKDKDFLDNEENEDILEDIVLTLTLFEDREMIEERLKTYAHLFDDKVMKQLKRRRYTGWGRLSRKLINGIRDKQSGKTILDFLKSDGFANRNFMQLIHDDSLTFKEDIQKAQVSGQGDSLHEHIANLAGSPAIKKGILQTVKVVDELVKVMGRHKPENIVIEMARENQTTQKGQKNSRERMKRIEEGIKELGSQILKEHPVENTQLQNEKLYLYYLQNGRDMYVDQELDINRLSDYDVDAIVPQSFLKDDSIDNKVLTRSDKNRGKSDNVPSEEVVKKMKNYWRQLLNAKLITQRKFDNLTKAERGGLSELDKAGFIKRQLVETRQITKHVAQILDSRMNTKYDENDKLIREVKVITLKSKLVSDFRKDFQFYKVREINNYHHAHDAYLNAVVGTALIKKYPKLESEFVYGDYKVYDVRKMIAKSEQEIGKATAKYFFYSNIMNFFKTEITLANGEIRKRPLIETNGETGEIVWDKGRDFATVRKVLSMPQVNIVKKTEVQTGGFSKESILPKRNSDKLIARKKDWDPKKYGGFDSPTVAYSVLVVAKVEKGKSKKLKSVKELLGITIMERSSFEKNPIDFLEAKGYKEVKKDLIIKLPKYSLFELENGRKRMLASAGELQKGNELALPSKYVNFLYLASHYEKLKGSPEDNEQKQLFVEQHKHYLDEIIEQISEFSKRVILADANLDKVLSAYNKHRDKPIREQAENIIHLFTLTNLGAPAAFKYFDTTIDRKRYTSTKEVLDATLIHQSITGLYETRIDLSQLGGDSGGSPKKKRKV

SEQ ID NO: 376 - protein, 1710 aa, Artificial Sequence
  Description of Artificial Sequence: Synthetic polypeptide
MSSETGPVAVDPTLRRRIEPHEFEVFFDPRELRKETCLLYEINWGGRHSIWRHTSQNTNKHVEVNFIEKFTTERYFCPNTRCSITWFLSWSPCGECSRAITEFLSRYPHVTLFIYIARLYHHADPRNRQGLRDLISSGVTIQIMTEQESGYCWRNFVNYSPSNEAHWPRYPHLWVRLYVLELYCIILGLPPCLNILRRKQPQLTFFTIALQSCHYQRLPPHILWATGLKSGSETPGTSESATPESDKKYSIGLAIGTNSVGWAVITDEYKVPSKKFKVLGNTDRHSIKKNLIGALLFDSGETAEATRLKRTARRRYTRRKNRICYLQEIFSNEMAKVDDSFFHRLEESFLVEEDKKHERHPIFGNIVDEVAYHEKYPTIYHLRKKLVDSTDKADLRLIYLALAHMIKFRGHFLIEGDLNPDNSDVDKLFIQLVQTYNQLFEENPINASGVDAKAILSARLSKSRRLENLIAQLPGEKKNGLFGNLIALSLGLTPNFKSNFDLAEDAKLQLSKDTYDDDLDNLLAQIGDQYADLFLAAKNLSDAILLSDILRVNTEITKAPLSASMIKRYDEHHQDLTLLKALVRQQLPEKYKEIFFDQSKNGYAGYIDGGASQEEFYKFIKPILEKMDGTEELLVKLNREDLLRKQRTFDNGSIPHQIHLGELHAILRRQEDFYPFLKDNREKIEKILTFRIPYYVGPLARGNSRFAWMTRKSEETITPWNFEEVVDKGASAQSFIERMTNFDKNLPNEKVLPKHSLLYEYFTVYNELTKVKYVTEGMRKPAFLSGEQKKAIVDLLFKTNRKVTVKQLKEDYFKKIECFDSVEISGVEDRFNASLGTYHDLLKIIKDKDFLDNEENEDILEDIVLTLTLFEDREMIEERLKTYAHLFDDKVMKQLKRRRYTGWGRLSRKLINGIRDKQSGKTILDFLKSDGFANRNFMQLIHDDSLTFKEDIQKAQVSGQGDSLHEHIANLAGSPAIKKGILQTVKVVDELVKVMGRHKPENIVIEMARENQTTQKGQKNSRERMKRIEEGIKELGSQILKEHPVENTQLQNEKLYLYYLQNGRDMYVDQELDINRLSDYDVDAIVPQSFLKDDSIDNKVLTRSDKNRGKSDNVPSEEVVKKMKNYWRQLLNAKLITQRKFDNLTKAERGGLSELDKAGFIKRQLVETRQITKHVAQILDSRMNTKYDENDKLIREVKVITLKSKLVSDFRKDFQFYKVREINNYHHAHDAYLNAVVGTALIKKYPKLESEFVYGDYKVYDVRKMIAKSEQEIGKATAKYFFYSNIMNFFKTEITLANGEIRKRPLIETNGETGEIVWDKGRDFATVRKVLSMPQVNIVKKTEVQTGGFSKESILPKRNSDKLIARKKDWDPKKYGGFDSPTVAYSVLVVAKVEKGKSKKLKSVKELLGITIMERSSFEKNPIDFLEAKGYKEVKKDLIIKLPKYSLFELENGRKRMLASAGELQKGNELALPSKYVNFLYLASHYEKLKGSPEDNEQKQLFVEQHKHYLDEIIEQISEFSKRVILADANLDKVLSAYNKHRDKPIREQAENIIHLFTLTNLGAPAAFKYFDTTIDRKRYTSTKEVLDATLIHQSITGLYETRIDLSQLGGDSGGSTNLSDIIEKETGKQLVIQESILMLPEEVEEVIGNKPESDILVHTAYDESTDENVMLLTSDAPEYKPWALVIQDSNGENKIKMLSGGSPKKKRKV

SEQ ID NO: 377 - protein, 1710 aa, Artificial Sequence
  Description of Artificial Sequence: Synthetic polypeptide
MSSETGPVAVDPTLRRRIEPHEFEVFFDPRELRKETCLLYEINWGGRHSIWRHTSQNTNKHVEVNFIEKFTTERYFCPNTRCSITWFLSWSPCGECSRAITEFLSRYPHVTLFIYIARLYHHADPRNRQGLRDLISSGVTIQIMTEQESGYCWRNFVNYSPSNEAHWPRYPHLWVRLYVLELYCIILGLPPCLNILRRKQPQLTFFTIALQSCHYQRLPPHILWATGLKSGSETPGTSESATPESDKKYSIGLAIGTNSVGWAVITDEYKVPSKKFKVLGNTDRHSIKKNLIGALLFDSGETAEATRLKRTARRRYTRRKNRICYLQEIFSNEMAKVDDSFFHRLEESFLVEEDKKHERHPIFGNIVDEVAYHEKYPTIYHLRKKLVDSTDKADLRLIYLALAHMIKFRGHFLIEGDLNPDNSDVDKLFIQLVQTYNQLFEENPINASGVDAKAILSARLSKSRRLENLIAQLPGEKKNGLFGNLIALSLGLTPNFKSNFDLAEDAKLQLSKDTYDDDLDNLLAQIGDQYADLFLAAKNLSDAILLSDILRVNTEITKAPLSASMIKRYDEHHQDLTLLKALVRQQLPEKYKEIFFDQSKNGYAGYIDGGASQEEFYKFIKPILEKMDGTEELLVKLNREDLLRKQRTFDNGSIPHQIHLGELHAILRRQEDFYPFLKDNREKIEKILTFRIPYYVGPLARGNSRFAWMTRKSEETITPWNFEEVVDKGASAQSFIERMTNFDKNLPNEKVLPKHSLLYEYFTVYNELTKVKYVTEGMRKPAFLSGEQKKAIVDLLFKTNRKVTVKQLKEDYFKKIECFDSVEISGVEDRFNASLGTYHDLLKIIKDKDFLDNEENEDILEDIVLTLTLFEDREMIEERLKTYAHLFDDKVMKQLKRRRYTGWGRLSRKLINGIRDKQSGKTILDFLKSDGFANRNFMQLIHDDSLTFKEDIQKAQVSGQGDSLHEHIANLAGSPAIKKGILQTVKVVDELVKVMGRHKPENIVIEMARENQTTQKGQKNSRERMKRIEEGIKELGSQILKEHPVENTQLQNEKLYLYYLQNGRDMYVDQELDINRLSDYDVDHIVPQSFLKDDSIDNKVLTRSDKNRGKSDNVPSEEVVKKMKNYWRQLLNAKLITQRKFDNLTKAERGGLSELDKAGFIKRQLVETRQITKHVAQILDSRMNTKYDENDKLIREVKVITLKSKLVSDFRKDFQFYKVREINNYHHAHDAYLNAVVGTALIKKYPKLESEFVYGDYKVYDVRKMIAKSEQEIGKATAKYFFYSNIMNFFKTEITLANGEIRKRPLIETNGETGEIVWDKGRDFATVRKVLSMPQVNIVKKTEVQTGGFSKESILPKRNSDKLIARKKDWDPKKYGGFDSPTVAYSVLVVAKVEKGKSKKLKSVKELLGITIMERSSFEKNPIDFLEAKGYKEVKKDLIIKLPKYSLFELENGRKRMLASAGELQKGNELALPSKYVNFLYLASHYEKLKGSPEDNEQKQLFVEQHKHYLDEIIEQISEFSKRVILADANLDKVLSAYNKHRDKPIREQAENIIHLFTLTNLGAPAAFKYFDTTIDRKRYTSTKEVLDATLIHQSITGLYETRIDLSQLGGDSGGSTNLSDIIEKETGKQLVIQESILMLPEEVEEVIGNKPESDILVHTAYDESTDENVMLLTSDAPEYKPWALVIQDSNGENKIKMLSGGSPKKKRKV

SEQ ID NO: 378 - protein, 1689 aa, Artificial Sequence
  Description of Artificial Sequence: Synthetic polypeptide
MTDAEYVRIHEKLDIYTFKKQFFNNKKSVSHRCYVLFELKRRGERRACFWGYAVNKPQSGTERGIHAEIFSIRKVEEYLRDNPGQFTINWYSSWSPCADCAEKILEWYNQELRGNGHTLKIWACKLYYEKNARNQIGLWNLRDNGVGLNVMVSEHYQCCRKIFIQSSHNQLNENRWLEKTLKRAEKRRSELSIMIQVKILHTTKSPAVSGSETPGTSESATPESDKKYSIGLAIGTNSVGWAVITDEYKVPSKKFKVLGNTDRHSIKKNLIGALLFDSGETAEATRLKRTARRRYTRRKNRICYLQEIFSNEMAKVDDSFFHRLEESFLVEEDKKHERHPIFGNIVDEVAYHEKYPTIYHLRKKLVDSTDKADLRLIYLALAHMIKFRGHFLIEGDLNPDNSDVDKLFIQLVQTYNQLFEENPINASGVDAKAILSARLSKSRRLENLIAQLPGEKKNGLFGNLIALSLGLTPNFKSNFDLAEDAKLQLSKDTYDDDLDNLLAQIGDQYADLFLAAKNLSDAILLSDILRVNTEITKAPLSASMIKRYDEHHQDLTLLKALVRQQLPEKYKEIFFDQSKNGYAGYIDGGASQEEFYKFIKPILEKMDGTEELLVKLNREDLLRKQRTFDNGSIPHQIHLGELHAILRRQEDFYPFLKDNREKIEKILTFRIPYYVGPLARGNSRFAWMTRKSEETITPWNFEEVVDKGASAQSFIERMTNFDKNLPNEKVLPKHSLLYEYFTVYNELTKVKYVTEGMRKPAFLSGEQKKAIVDLLFKTNRKVTVKQLKEDYFKKIECFDSVEISGVEDRFNASLGTYHDLLKIIKDKDFLDNEENEDILEDIVLTLTLFEDREMIEERLKTYAHLFDDKVMKQLKRRRYTGWGRLSRKLINGIRDKQSGKTILDFLKSDGFANRNFMQLIHDDSLTFKEDIQKAQVSGQGDSLHEHIANLAGSPAIKKGILQTVKVVDELVKVMGRHKPENIVIEMARENQTTQKGQKNSRERMKRIEEGIKELGSQILKEHPVENTQLQNEKLYLYYLQNGRDMYVDQELDINRLSDYDVDHIVPQSFLKDDSIDNKVLTRSDKNRGKSDNVPSEEVVKKMKNYWRQLLNAKLITQRKFDNLTKAERGGLSELDKAGFIKRQLVETRQITKHVAQILDSRMNTKYDENDKLIREVKVITLKSKLVSDFRKDFQFYKVREINNYHHAHDAYLNAVVGTALIKKYPKLESEFVYGDYKVYDVRKMIAKSEQEIGKATAKYFFYSNIMNFFKTEITLANGEIRKRPLIETNGETGEIVWDKGRDFATVRKVLSMPQVNIVKKTEVQTGGFSKESILPKRNSDKLIARKKDWDPKKYGGFDSPTVAYSVLVVAKVEKGKSKKLKSVKELLGITIMERSSFEKNPIDFLEAKGYKEVKKDLIIKLPKYSLFELENGRKRMLASAGELQKGNELALPSKYVNFLYLASHYEKLKGSPEDNEQKQLFVEQHKHYLDEIIEQISEFSKRVILADANLDKVLSAYNKHRDKPIREQAENIIHLFTLTNLGAPAAFKYFDTTIDRKRYTSTKEVLDATLIHQSITGLYETRIDLSQLGGDSGGSTNLSDIIEKETGKQLVIQESILMLPEEVEEVIGNKPESDILVHTAYDESTDENVMLLTSDAPEYKPWALVIQDSNGENKIKMLSGGSPKKKRKV

SEQ ID NO: 379 - protein, 1679 aa, Artificial Sequence
  Description of Artificial Sequence: Synthetic polypeptide
MDSLLMNRRKFLYQFKNVRWAKGRRETYLCYVVKRRDSATSFSLDFGYLRNKNGCHVELLFLRYISDWDLDPGRCYRVTWFTSWSPCYDCARHVADFLRGNPNLSLRIFTARLYFCEDRKAEPEGLRRLHRAGVQIAIMTFKDYFYCWNTFVENHERTFKAWEGLHENSVRLSRQLRRILLPLYEVDDLRDAFRTLGLSGSETPGTSESATPESDKKYSIGLAIGTNSVGWAVITDEYKVPSKKFKVLGNTDRHSIKKNLIGALLFDSGETAEATRLKRTARRRYTRRKNRICYLQEIFSNEMAKVDDSFFHRLEESFLVEEDKKHERHPIFGNIVDEVAYHEKYPTIYHLRKKLVDSTDKADLRLIYLALAHMIKFRGHFLIEGDLNPDNSDVDKLFIQLVQTYNQLFEENPINASGVDAKAILSARLSKSRRLENLIAQLPGEKKNGLFGNLIALSLGLTPNFKSNFDLAEDAKLQLSKDTYDDDLDNLLAQIGDQYADLFLAAKNLSDAILLSDILRVNTEITKAPLSASMIKRYDEHHQDLTLLKALVRQQLPEKYKEIFFDQSKNGYAGYIDGGASQEEFYKFIKPILEKMDGTEELLVKLNREDLLRKQRTFDNGSIPHQIHLGELHAILRRQEDFYPFLKDNREKIEKILTFRIPYYVGPLARGNSRFAWMTRKSEETITPWNFEEVVDKGASAQSFIERMTNFDKNLPNEKVLPKHSLLYEYFTVYNELTKVKYVTEGMRKPAFLSGEQKKAIVDLLFKTNRKVTVKQLKEDYFKKIECFDSVEISGVEDRFNASLGTYHDLLKIIKDKDFLDNEENEDILEDIVLTLTLFEDREMIEERLKTYAHLFDDKVMKQLKRRRYTGWGRLSRKLINGIRDKQSGKTILDFLKSDGFANRNFMQLIHDDSLTFKEDIQKAQVSGQGDSLHEHIANLAGSPAIKKGILQTVKVVDELVKVMGRHKPENIVIEMARENQTTQKGQKNSRERMKRIEEGIKELGSQILKEHPVENTQLQNEKLYLYYLQNGRDMYVDQELDINRLSDYDVDHIVPQSFLKDDSIDNKVLTRSDKNRGKSDNVPSEEVVKKMKNYWRQLLNAKLITQRKFDNLTKAERGGLSELDKAGFIKRQLVETRQITKHVAQILDSRMNTKYDENDKLIREVKVITLKSKLVSDFRKDFQFYKVREINNYHHAHDAYLNAVVGTALIKKYPKLESEFVYGDYKVYDVRKMIAKSEQEIGKATAKYFFYSNIMNFFKTEITLANGEIRKRPLIETNGETGEIVWDKGRDFATVRKVLSMPQVNIVKKTEVQTGGFSKESILPKRNSDKLIARKKDWDPKKYGGFDSPTVAYSVLVVAKVEKGKSKKLKSVKELLGITIMERSSFEKNPIDFLEAKGYKEVKKDLIIKLPKYSLFELENGRKRMLASAGELQKGNELALPSKYVNFLYLASHYEKLKGSPEDNEQKQLFVEQHKHYLDEIIEQISEFSKRVILADANLDKVLSAYNKHRDKPIREQAENIIHLFTLTNLGAPAAFKYFDTTIDRKRYTSTKEVLDATLIHQSITGLYETRIDLSQLGGDSGGSTNLSDIIEKETGKQLVIQESILMLPEEVEEVIGNKPESDILVHTAYDESTDENVMLLTSDAPEYKPWALVIQDSNGENKIKMLSGGSPKKKRKV

SEQ ID NO: 380 - protein, 1899 aa, Artificial Sequence
  Description of Artificial Sequence: Synthetic polypeptide
MAKPAKRIKSAAAAYVPQNRDAVITDIKRIGDLQREASRLETEMNDAIAEITEKFAARIAPIKTDIETLSKGVQGWCEANRDELTNGGKVKTANLVTGDVSWRVRPPSVSIRGMDAVMETLERLGLQRFIRTKQEINKEAILLEPKAVAGVAGITVKSGIEDFSIIPFEQEAGISGSETPGTSESATPESSSETGPVAVDPTLRRRIEPHEFEVFFDPRELRKETCLLYEINWGGRHSIWRHTSQNTNKHVEVNFIEKFTTERYFCPNTRCSITWFLSWSPCGECSRAITEFLSRYPHVTLFIYIARLYHHADPRNRQGLRDLISSGVTIQIMTEQESGYCWRNFVNYSPSNEAHWPRYPHLWVRLYVLELYCIILGLPPCLNILRRKQPQLTFFTIALQSCHYQRLPPHILWATGLKSGSETPGTSESATPESDKKYSIGLAIGTNSVGWAVITDEYKVPSKKFKVLGNTDRHSIKKNLIGALLFDSGETAEATRLKRTARRRYTRRKNRICYLQEIFSNEMAKVDDSFFHRLEESFLVEEDKKHERHPIFGNIVDEVAYHEKYPTIYHLRKKLVDSTDKADLRLIYLALAHMIKFRGHFLIEGDLNPDNSDVDKLFIQLVQTYNQLFEENPINASGVDAKAILSARLSKSRRLENLIAQLPGEKKNGLFGNLIALSLGLTPNFKSNFDLAEDAKLQLSKDTYDDDLDNLLAQIGDQYADLFLAAKNLSDAILLSDILRVNTEITKAPLSASMIKRYDEHHQDLTLLKALVRQQLPEKYKEIFFDQSKNGYAGYIDGGASQEEFYKFIKPILEKMDGTEELLVKLNREDLLRKQRTFDNGSIPHQIHLGELHAILRRQEDFYPFLKDNREKIEKILTFRIPYYVGPLARGNSRFAWMTRKSEETITPWNFEEVVDKGASAQSFIERMTNFDKNLPNEKVLPKHSLLYEYFTVYNELTKVKYVTEGMRKPAFLSGEQKKAIVDLLFKTNRKVTVKQLKEDYFKKIECFDSVEISGVEDRFNASLGTYHDLLKIIKDKDFLDNEENEDILEDIVLTLTLFEDREMIEERLKTYAHLFDDKVMKQLKRRRYTGWGRLSRKLINGIRDKQSGKTILDFLKSDGFANRNFMQLIHDDSLTFKEDIQKAQVSGQGDSLHEHIANLAGSPAIKKGILQTVKVVDELVKVMGRHKPENIVIEMARENQTTQKGQKNSRERMKRIEEGIKELGSQILKEHPVENTQLQNEKLYLYYLQNGRDMYVDQELDINRLSDYDVDHIVPQSFLKDDSIDNKVLTRSDKNRGKSDNVPSEEVVKKMKNYWRQLLNAKLITQRKFDNLTKAERGGLSELDKAGFIKRQLVETRQITKHVAQILDSRMNTKYDENDKLIREVKVITLKSKLVSDFRKDFQFYKVREINNYHHAHDAYLNAVVGTALIKKYPKLESEFVYGDYKVYDVRKMIAKSEQEIGKATAKYFFYSNIMNFFKTEITLANGEIRKRPLIETNGETGEIVWDKGRDFATVRKVLSMPQVNIVKKTEVQTGGFSKESILPKRNSDKLIARKKDWDPKKYGGFDSPTVAYSVLVVAKVEKGKSKKLKSVKELLGITIMERSSFEKNPIDFLEAKGYKEVKKDLIIKLPKYSLFELENGRKRMLASAGELQKGNELALPSKYVNFLYLASHYEKLKGSPEDNEQKQLFVEQHKHYLDEIIEQISEFSKRVILADANLDKVLSAYNKHRDKPIREQAENIIHLFTLTNLGAPAAFKYFDTTIDRKRYTSTKEVLDATLIHQSITGLYETRIDLSQLGGDSGGSTNLSDIIEKETGKQLVIQESILMLPEEVEEVIGNKPESDILVHTAYDESTDENVMLLTSDAPEYKPWALVIQDSNGENKIKMLSGGSPKKKRKV

SEQ ID NO: 381 - protein, 1618 aa, Artificial Sequence
  Description of Artificial Sequence: Synthetic polypeptide
MAKPAKRIKSAAAAYVPQNRDAVITDIKRIGDLQREASRLETEMNDAIAEITEKFAARIAPIKTDIETLSKGVQGWCEANRDELTNGGKVKTANLVTGDVSWRVRPPSVSIRGMDAVMETLERLGLQRFIRTKQEINKEAILLEPKAVAGVAGITVKSGIEDFSIIPFEQEAGISGSETPGTSESATPESSSETGPVAVDPTLRRRIEPHEFEVFFDPRELRKETCLLYEINWGGRHSIWRHTSQNTNKHVEVNFIEKFTTERYFCPNTRCSITWFLSWSPCGECSRAITEFLSRYPHVTLFIYIARLYHHADPRNRQGLRDLISSGVTIQIMTEQESGYCWRNFVNYSPSNEAHWPRYPHLWVRLYVLELYCIILGLPPCLNILRRKQPQLTFFTIALQSCHYQRLPPHILWATGLKSGSETPGTSESATPESGKRNYILGLAIGITSVGYGIIDYETRDVIDAGVRLFKEANVENNEGRRSKRGARRLKRRRRHRIQRVKKLLFDYNLLTDHSELSGINPYEARVKGLSQKLSEEEFSAALLHLAKRRGVHNVNEVEEDTGNELSTKEQISRNSKALEEKYVAELQLERLKKDGEVRGSINRFKTSDYVKEAKQLLKVQKAYHQLDQSFIDTYIDLLETRRTYYEGPGEGSPFGWKDIKEWYEMLMGHCTYFPEELRSVKYAYNADLYNALNDLNNLVITRDENEKLEYYEKFQIIENVFKQKKKPTLKQIAKEILVNEEDIKGYRVTSTGKPEFTNLKVYHDIKDITARKEIIENAELLDQIAKILTIYQSSEDIQEELTNLNSELTQEEIEQISNLKGYTGTHNLSLKAINLILDELWHTNDNQIAIFNRLKLVPKKVDLSQQKEIPTTLVDDFILSPVVKRSFIQSIKVINAIIKKYGLPNDIIIELAREKNSKDAQKMINEMQKRNRQTNERIEEIIRTTGKENAKYLIEKIKLHDMQEGKCLYSLEAIPLEDLLNNPFNYEVDHIIPRSVSFDNSFNNKVLVKQEENSKKGNRTPFQYLSSSDSKISYETFKKHILNLAKGKGRISKTKKEYLLEERDINRFSVQKDFINRNLVDTRYATRGLMNLLRSYFRVNNLDVKVKSINGGFTSFLRRKWKFKKERNKGYKHHAEDALIIANADFIFKEWKKLDKAKKVMENQMFEEKQAESMPEIETEQEYKEIFITPHQIKHIKDFKDYKYSHRVDKKPNRELINDTLYSTRKDDKGNTLIVNNLNGLYDKDNDKLKKLINKSPEKLLMYHHDPQTYQKLKLIMEQYGDEKNPLYKYYEETGNYLTKYSKKDNGPVIKKIKYYGNKLNAHLDITDDYPNSRNKVVKLSLKPYRFDVYLDNGVYKFVTVKNLDVIKKENYYEVNSKCYEEAKKLKKISNQAEFIASFYNNDLIKINGELYRVIGVNNDLLNRIEVNMIDITYREYLENMNDKRPPRIIKTIASKTQSIKKYSTDILGNLYEVKSKKHPQIIKKGGSPKKKRKVSSDYKDHDGDYKDHDIDYKDDDDKSGGSTNLSDIIEKETGKQLVIQESILMLPEEVEEVIGNKPESDILVHTAYDESTDENVMLLTSDAPEYKPWALVIQDSNGENKIKMLSGGSPKKKRKV

SEQ ID NO: 382 - protein, 1824 aa, Artificial Sequence
  Description of Artificial Sequence: Synthetic polypeptide
MSSETGPVAVDPTLRRRIEPHEFEVFFDPRELRKETCLLYEINWGGRHSIWRHTSQNTNKHVEVNFIEKFTTERYFCPNTRCSITWFLSWSPCGECSRAITEFLSRYPHVTLFIYIARLYHHADPRNRQGLRDLISSGVTIQIMTEQESGYCWRNFVNYSPSNEAHWPRYPHLWVRLYVLELYCIILGLPPCLNILRRKQPQLTFFTIALQSCHYQRLPPHILWATGLKSGGSSGGSSGSETPGTSESATPESSGGSSGGSDKKYSIGLAIGTNSVGWAVITDEYKVPSKKFKVLGNTDRHSIKKNLIGALLFDSGETAEATRLKRTARRRYTRRKNRICYLQEIFSNEMAKVDDSFFHRLEESFLVEEDKKHERHPIFGNIVDEVAYHEKYPTIYHLRKKLVDSTDKADLRLIYLALAHMIKFRGHFLIEGDLNPDNSDVDKLFIQLVQTYNQLFEENPINASGVDAKAILSARLSKSRRLENLIAQLPGEKKNGLFGNLIALSLGLTPNFKSNFDLAEDAKLQLSKDTYDDDLDNLLAQIGDQYADLFLAAKNLSDAILLSDILRVNTEITKAPLSASMIKRYDEHHQDLTLLKALVRQQLPEKYKEIFFDQSKNGYAGYIDGGASQEEFYKFIKPILEKMDGTEELLVKLNREDLLRKQRTFDNGSIPHQIHLGELHAILRRQEDFYPFLKDNREKIEKILTFRIPYYVGPLARGNSRFAWMTRKSEETITPWNFEEVVDKGASAQSFIERMTNFDKNLPNEKVLPKHSLLYEYFTVYNELTKVKYVTEGMRKPAFLSGEQKKAIVDLLFKTNRKVTVKQLKEDYFKKIECFDSVEISGVEDRFNASLGTYHDLLKIIKDKDFLDNEENEDILEDIVLTLTLFEDREMIEERLKTYAHLFDDKVMKQLKRRRYTGWGRLSRKLINGIRDKQSGKTILDFLKSDGFANRNFMQLIHDDSLTFKEDIQKAQVSGQGDSLHEHIANLAGSPAIKKGILQTVKVVDELVKVMGRHKPENIVIEMARENQTTQKGQKNSRERMKRIEEGIKELGSQILKEHPVENTQLQNEKLYLYYLQNGRDMYVDQELDINRLSDYDVDHIVPQSFLKDDSIDNKVLTRSDKNRGKSDNVPSEEVVKKMKNYWRQLLNAKLITQRKFDNLTKAERGGLSELDKAGFIKRQLVETRQITKHVAQILDSRMNTKYDENDKLIREVKVITLKSKLVSDFRKDFQFYKVREINNYHHAHDAYLNAVVGTALIKKYPKLESEFVYGDYKVYDVRKMIAKSEQEIGKATAKYFFYSNIMNFFKTEITLANGEIRKRPLIETNGETGEIVWDKGRDFATVRKVLSMPQVNIVKKTEVQTGGFSKESILPKRNSDKLIARKKDWDPKKYGGFDSPTVAYSVLVVAKVEKGKSKKLKSVKELLGITIMERSSFEKNPIDFLEAKGYKEVKKDLIIKLPKYSLFELENGRKRMLASAGELQKGNELALPSKYVNFLYLASHYEKLKGSPEDNEQKQLFVEQHKHYLDEIIEQISEFSKRVILADANLDKVLSAYNKHRDKPIREQAENIIHLFTLTNLGAPAAFKYFDTTIDRKRYTSTKEVLDATLIHQSITGLYETRIDLSQLGGDSGGSGGSGGSTNLSDIIEKETGKQLVIQESILMLPEEVEEVIGNKPESDILVHTAYDESTDENVMLLTSDAPEYKPWALVIQDSNGENKIKMLSGGSGGSGGSTNLSDIIEKETGKQLVIQESILMLPEEVEEVIGNKPESDILVHTAYDESTDENVMLLTSDAPEYKPWALVIQDSNGENKIKMLSGGSPKKKRK

SEQ ID NO: 383 - protein, 2013 aa, Artificial Sequence
  Description of Artificial Sequence: Synthetic polypeptide
MAKPAKRIKSAAAAYVPQNRDAVITDIKRIGDLQREASRLETEMNDAIAEITEKFAARIAPIKTDIETLSKGVQGWCEANRDELTNGGKVKTANLVTGDVSWRVRPPSVSIRGMDAVMETLERLGLQRFIRTKQEINKEAILLEPKAVAGVAGITVKSGIEDFSIIPFEQEAGISGSETPGTSESATPESSSETGPVAVDPTLRRRIEPHEFEVFFDPRELRKETCLLYEINWGGRHSIWRHTSQNTNKHVEVNFIEKFTTERYFCPNTRCSITWFLSWSPCGECSRAITEFLSRYPHVTLFIYIARLYHHADPRNRQGLRDLISSGVTIQIMTEQESGYCWRNFVNYSPSNEAHWPRYPHLWVRLYVLELYCIILGLPPCLNILRRKQPQLTFFTIALQSCHYQRLPPHILWATGLKSGGSSGGSSGSETPGTSESATPESSGGSSGGSDKKYSIGLAIGTNSVGWAVITDEYKVPSKKFKVLGNTDRHSIKKNLIGALLFDSGETAEATRLKRTARRRYTRRKNRICYLQEIFSNEMAKVDDSFFHRLEESFLVEEDKKHERHPIFGNIVDEVAYHEKYPTIYHLRKKLVDSTDKADLRLIYLALAHMIKFRGHFLIEGDLNPDNSDVDKLFIQLVQTYNQLFEENPINASGVDAKAILSARLSKSRRLENLIAQLPGEKKNGLFGNLIALSLGLTPNFKSNFDLAEDAKLQLSKDTYDDDLDNLLAQIGDQYADLFLAAKNLSDAILLSDILRVNTEITKAPLSASMIKRYDEHHQDLTLLKALVRQQLPEKYKEIFFDQSKNGYAGYIDGGASQEEFYKFIKPILEKMDGTEELLVKLNREDLLRKQRTFDNGSIPHQIHLGELHAILRRQEDFYPFLKDNREKIEKILTFRIPYYVGPLARGNSRFAWMTRKSEETITPWNFEEVVDKGASAQSFIERMTNFDKNLPNEKVLPKHSLLYEYFTVYNELTKVKYVTEGMRKPAFLSGEQKKAIVDLLFKTNRKVTVKQLKEDYFKKIECFDSVEISGVEDRFNASLGTYHDLLKIIKDKDFLDNEENEDILEDIVLTLTLFEDREMIEERLKTYAHLFDDKVMKQLKRRRYTGWGRLSRKLINGIRDKQSGKTILDFLKSDGFANRNFMQLIHDDSLTFKEDIQKAQVSGQGDSLHEHIANLAGSPAIKKGILQTVKVVDELVKVMGRHKPENIVIEMARENQTTQKGQKNSRERMKRIEEGIKELGSQILKEHPVENTQLQNEKLYLYYLQNGRDMYVDQELDINRLSDYDVDHIVPQSFLKDDSIDNKVLTRSDKNRGKSDNVPSEEVVKKMKNYWRQLLNAKLITQRKFDNLTKAERGGLSELDKAGFIKRQLVETRQITKHVAQILDSRMNTKYDENDKLIREVKVITLKSKLVSDFRKDFQFYKVREINNYHHAHDAYLNAVVGTALIKKYPKLESEFVYGDYKVYDVRKMIAKSEQEIGKATAKYFFYSNIMNFFKTEITLANGEIRKRPLIETNGETGEIVWDKGRDFATVRKVLSMPQVNIVKKTEVQTGGFSKESILPKRNSDKLIARKKDWDPKKYGGFDSPTVAYSVLVVAKVEKGKSKKLKSVKELLGITIMERSSFEKNPIDFLEAKGYKEVKKDLIIKLPKYSLFELENGRKRMLASAGELQKGNELALPSKYVNFLYLASHYEKLKGSPEDNEQKQLFVEQHKHYLDEIIEQISEFSKRVILADANLDKVLSAYNKHRDKPIREQAENIIHLFTLTNLGAPAAFKYFDTTIDRKRYTSTKEVLDATLIHQSITGLYETRIDLSQLGGDSGGSGGSGGSTNLSDIIEKETGKQLVIQESILMLPEEVEEVIGNKPESDILVHTAYDESTDENVMLLTSDAPEYKPWALVIQDSNGENKIKMLSGGSGGSGGSTNLSDIIEKETGKQLVIQESILMLPEEVEEVIGNKPESDILVHTAYDESTDENVMLLTSDAPEYKPWALVIQDSNGENKIKMLSGGSPKKKRK

SEQ ID NO: 384 - protein, 1544 aa, Artificial Sequence
  Description of Artificial Sequence: Synthetic polypeptide
MSSETGPVAVDPTLRRRIEPHEFEVFFDPRELRKETCLLYEINWGGRHSIWRHTSQNTNKHVEVNFIEKFTTERYFCPNTRCSITWFLSWSPCGECSRAITEFLSRYPHVTLFIYIARLYHHADPRNRQGLRDLISSGVTIQIMTEQESGYCWRNFVNYSPSNEAHWPRYPHLWVRLYVLELYCIILGLPPCLNILRRKQPQLTFFTIALQSCHYQRLPPHILWATGLKSGGSSGGSSGSETPGTSESATPESSGGSSGGSGKRNYILGLAIGITSVGYGIIDYETRDVIDAGVRLFKEANVENNEGRRSKRGARRLKRRRRHRIQRVKKLLFDYNLLTDHSELSGINPYEARVKGLSQKLSEEEFSAALLHLAKRRGVHNVNEVEEDTGNELSTKEQISRNSKALEEKYVAELQLERLKKDGEVRGSINRFKTSDYVKEAKQLLKVQKAYHQLDQSFIDTYIDLLETRRTYYEGPGEGSPFGWKDIKEWYEMLMGHCTYFPEELRSVKYAYNADLYNALNDLNNLVITRDENEKLEYYEKFQIIENVFKQKKKPTLKQIAKEILVNEEDIKGYRVTSTGKPEFTNLKVYHDIKDITARKEIIENAELLDQIAKILTIYQSSEDIQEELTNLNSELTQEEIEQISNLKGYTGTHNLSLKAINLILDELWHTNDNQIAIFNRLKLVPKKVDLSQQKEIPTTLVDDFILSPVVKRSFIQSIKVINAIIKKYGLPNDIIIELAREKNSKDAQKMINEMQKRNRQTNERIEEIIRTTGKENAKYLIEKIKLHDMQEGKCLYSLEAIPLEDLLNNPFNYEVDHIIPRSVSFDNSFNNKVLVKQEENSKKGNRTPFQYLSSSDSKISYETFKKHILNLAKGKGRISKTKKEYLLEERDINRFSVQKDFINRNLVDTRYATRGLMNLLRSYFRVNNLDVKVKSINGGFTSFLRRKWKFKKERNKGYKHHAEDALIIANADFIFKEWKKLDKAKKVMENQMFEEKQAESMPEIETEQEYKEIFITPHQIKHIKDFKDYKYSHRVDKKPNRELINDTLYSTRKDDKGNTLIVNNLNGLYDKDNDKLKKLINKSPEKLLMYHHDPQTYQKLKLIMEQYGDEKNPLYKYYEETGNYLTKYSKKDNGPVIKKIKYYGNKLNAHLDITDDYPNSRNKVVKLSLKPYRFDVYLDNGVYKFVTVKNLDVIKKENYYEVNSKCYEEAKKLKKISNQAEFIASFYNNDLIKINGELYRVIGVNNDLLNRIEVNMIDITYREYLENMNDKRPPRIIKTIASKTQSIKKYSTDILGNLYEVKSKKHPQIIKKGGSPKKKRKVSSDYKDHDGDYKDHDIDYKDDDDKSGGSGGSGGSTNLSDIIEKETGKQLVIQESILMLPEEVEEVIGNKPESDILVHTAYDESTDENVMLLTSDAPEYKPWALVIQDSNGENKIKMLSGGSGGSGGSTNLSDIIEKETGKQLVIQESILMLPEEVEEVIGNKPESDILVHTAYDESTDENVMLLTSDAPEYKPWALVIQDSNGENKIKMLSGGSPKKKRKV

SEQ ID NO: 385 - protein, 1733 aa, Artificial Sequence
  Description of Artificial Sequence: Synthetic polypeptide
MAKPAKRIKSAAAAYVPQNRDAVITDIKRIGDLQREASRLETEMNDAIAEITEKFAARIAPIKTDIETLSKGVQGWCEANRDELTNGGKVKTANLVTGDVSWRVRPPSVSIRGMDAVMETLERLGLQRFIRTKQEINKEAILLEPKAVAGVAGITVKSGIEDFSIIPFEQEAGISGSETPGTSESATPESSSETGPVAVDPTLRRRIEPHEFEVFFDPRELRKETCLLYEINWGGRHSIWRHTSQNTNKHVEVNFIEKFTTERYFCPNTRCSITWFLSWSPCGECSRAITEFLSRYPHVTLFIYIARLYHHADPRNRQGLRDLISSGVTIQIMTEQESGYCWRNFVNYSPSNEAHWPRYPHLWVRLYVLELYCIILGLPPCLNILRRKQPQLTFFTIALQSCHYQRLPPHILWATGLKSGGSSGGSSGSETPGTSESATPESSGGSSGGSGKRNYILGLAIGITSVGYGIIDYETRDVIDAGVRLFKEANVENNEGRRSKRGARRLKRRRRHRIQRVKKLLFDYNLLTDHSELSGINPYEARVKGLSQKLSEEEFSAALLHLAKRRGVHNVNEVEEDTGNELSTKEQISRNSKALEEKYVAELQLERLKKDGEVRGSINRFKTSDYVKEAKQLLKVQKAYHQLDQSFIDTYIDLLETRRTYYEGPGEGSPFGWKDIKEWYEMLMGHCTYFPEELRSVKYAYNADLYNALNDLNNLVITRDENEKLEYYEKFQIIENVFKQKKKPTLKQIAKEILVNEEDIKGYRVTSTGKPEFTNLKVYHDIKDITARKEIIENAELLDQIAKILTIYQSSEDIQEELTNLNSELTQEEIEQISNLKGYTGTHNLSLKAINLILDELWHTNDNQIAIFNRLKLVPKKVDLSQQKEIPTTLVDDFILSPVVKRSFIQSIKVINAIIKKYGLPNDIIIELAREKNSKDAQKMINEMQKRNRQTNERIEEIIRTTGKENAKYLIEKIKLHDMQEGKCLYSLEAIPLEDLLNNPFNYEVDHIIPRSVSFDNSFNNKVLVKQEENSKKGNRTPFQYLSSSDSKISYETFKKHILNLAKGKGRISKTKKEYLLEERDINRFSVQKDFINRNLVDTRYATRGLMNLLRSYFRVNNLDVKVKSINGGFTSFLRRKWKFKKERNKGYKHHAEDALIIANADFIFKEWKKLDKAKKVMENQMFEEKQAESMPEIETEQEYKEIFITPHQIKHIKDFKDYKYSHRVDKKPNRELINDTLYSTRKDDKGNTLIVNNLNGLYDKDNDKLKKLINKSPEKLLMYHHDPQTYQKLKLIMEQYGDEKNPLYKYYEETGNYLTKYSKKDNGPVIKKIKYYGNKLNAHLDITDDYPNSRNKVVKLSLKPYRFDVYLDNGVYKFVTVKNLDVIKKENYYEVNSKCYEEAKKLKKISNQAEFIASFYNNDLIKINGELYRVIGVNNDLLNRIEVNMIDITYREYLENMNDKRPPRIIKTIASKTQSIKKYSTDILGNLYEVKSKKHPQIIKKGGSPKKKRKVSSDYKDHDGDYKDHDIDYKDDDDKSGGSGGSGGSTNLSDIIEKETGKQLVIQESILMLPEEVEEVIGNKPESDILVHTAYDESTDENVMLLTSDAPEYKPWALVIQDSNGENKIKMLSGGSGGSGGSTNLSDIIEKETGKQLVIQESILMLPEEVEEVIGNKPESDILVHTAYDESTDENVMLLTSDAPEYKPWALVIQDSNGENKIKMLSGGSPKKKRKV

SEQ ID NO: 386 - protein, 1853 aa, Artificial Sequence
  Description of Artificial Sequence: Synthetic polypeptide
  MOD_RES (20)..(247): This region may encompass one of the following sequences: "SSETGPVAVDPTLRRRIEPHEFEVFFDPRELRKETCLLYEINWGGRHSIWRHTSQ NTNKHVEVNFIEKFTTERYFCPNTRCSITWFLSWSPCGECSRAITEFLSRYPHVTL FIYIARLYHHADPRNRQGLRDLISSGVTIQIMTEQESGYCWRNFVNYSPSNEAHWP
  MOD_RES (20)..(247): CONT. FROM ABOVE: RYPHLWVRLYVLELYCIILGLPPCLNILRRKQPQLTFF TIALQSCHYQRLPPHILWATGLK" or "SSETGPVAVDPTLRRRIEPHEFEVFFD PRELRKETCLLYEIKWGTSHKIWRHSSKNTTKHVEVNFIEKFTSERHFCPSTSCSI TWFLSWSPCGECSKAITEFLSQHPNVTLVIYVARLYHHMDQQNRQGLRDLVNSGVT
  MOD_RES (20)..(247): CONT. FROM ABOVE: IQIMTAPEYDYCWRNFVNYPPGKEAHWPRYPPLWMKLY ALELHAGILGLPPCLNILRRKQPQLTFFTIALQSCHYQRLPPHILWATGLK" or "SSETGPVAVDPTLRRRIEPHEFEVFFDPRELRKEACLLYEIKWGTSHKIWRNSGK NTTKHVEVNFIEKFTSERHFCPSISCSITWFLSWSPCWECSKAIREFLSQHPNVTL
  MOD_RES (20)..(247): CONT. FROM ABOVE: VIYVARLFQHMDQQNRQGLRDLVNSGVTIQIMTASEYD HCWRNFVNYPPGKEAHWPRYPPLWMKLYALELHAGILGLPPCLNILRRKQPQLTFF TIALQSCHYQRLPPHILWATGLK" or "SSETGPVAVDPTLRRRIEPEFFNRNYD PRELRKETYLLYEIKWGKESKIWRHTSNNRTQHAEVNFLENFFNELYFNPSTHCSI
  MOD_RES (20)..(247): CONT. FROM ABOVE: TWFLSWSPCGECSKAIVEFLKEHPNVNLEIYVARLYLC EDERNRQGLRDLVNSGVTIRIMNLPDYNYCWRTFVSHQGGDEDYWPRHFAPWVRLY VLELYCIILGLPPCLNILRRKQPQLTFFTIALQSCHYQRLPPHILWATGLK" or "SSETGPVAVDPTLRRRIEPFYFQFNNDPRACRRKTYLCYELKQDGSTWVWKRTLH
  MOD_RES (20)..(247): CONT. FROM ABOVE: NKGRHAEICFLEKISSLEKLDPAQHYRITWYMSWSPCS NCAQKIVDFLKEHPHVNLRIYVARLYYHEEERYQEGLRNLRRSGVSIRVMDLPDFE HCWETFVDNGGGPFQPWPGLEELNSKQLSRRLQAGILGLPPCLNILRRKQPQLTFF TIALQSCHYQRLPPHILWATGLK" or "SSETGPVAVDPTLRRRIEPFHFQFNND
  MOD_RES (20)..(247): CONT. FROM ABOVE: PRAYRRKTYLCYELKQDGSTWVLDRTLRNKGRHAEICF LDKINSWERLDPAQHYRVTWYMSWSPCSNCAQQVVDFLKEHPHVNLRIFAARLYYH EQRRYQEGLRSLRGSGVPVAVMTLPDFEHCWETFVDHGGRPFQPWDGLEELNSRSL SRRLQAGILGLPPCLNILRRKQPQLTFFTIALQSCHYQRLPPHILWATGLK" or
  MOD_RES (20)..(247): CONT. FROM ABOVE: "EFFNRNYDPRELRKETYLLYEIKWGKESKIWRHWCTS NNRTQHAEVNFLENFFNELYFNPSTHCSITWFLSWSPCGECSKAIVEFLKEHPNVN LEIYVARLYLCEDERNRQGLRDLVNSGVTIRIMNLPDYNYCWRTFVSHQGGDEDYW PRHFAPWVRL" or "FHFQFNNDPRAYRRKTYLCYELKQDGSTWVLDRGCTLRNK
  MOD_RES (20)..(247): CONT. FROM ABOVE: GRHAEICFLDKINSWERLDPAQHYRVTWYMSWSPCSNC AQQVVDFLKEHPHVNLRIFAARLYYHEQRRYQEGLRSLRGSGVPVAVMTLPDFEHC WETFVDHGGRPFQPWDGLEELNSRSLSRRLQAG" or "FERNYDPRELRKETYLL YEIKWGKSGKLWRHWCQNNRTQHAEVYFLENIFNARRFNPSTHCSITWYLSWSPCA
  MOD_RES (20)..(247): CONT. FROM ABOVE: ECSQKIVDFLKEHPNVNLEIYVARLYYHEDERNRQGLR DLVNSGVTIRIMDLPDYNYCWKTFVSDQGGDEDYWPGHFAPWIKQYSLKL" or " FYFQFNNDPRACRRKTYLCYELKQDGSTWVWKRGCTLHNKGRHAEICFLEKISSLE KLDPAQHYRITWYMSWSPCSNCAQKIVDFLKEHPHVNLRIYVARLYYHEEERYQEG
  MOD_RES (20)..(247): CONT. FROM ABOVE: LRNLRRSGVSIRVMDLPDFEHCWETFVDNGGGPFQPWP GLEENSKQLSRRLQAG" or "FYEEFNNTLKSCRHKTLLCFSLKQDENTTLWKWG YAHNNGRHAEILVLREIENYEKLDPAAKYRITLYMSYSPCNDCADKIVDFLKKHPN VNLNIKVSRLYYHEDEKYQEGLRNLKQPGVSLKVMDRSDFEECFDLFVDPGGGEFQ
  MOD_RES (20)..(247): CONT. FROM ABOVE: PWPGLEEKSKQYSATLQAG" or "SFERNYDPRELRK ETYLLYEIKWGKSGKLWRHWCQNNRTQHAEVYFLENIFNARRFNPSTHCSITWYLS WSPCAECSQKIVDFLKEHPNVNLEIYVARLYYPENERNRQGLRDLVNSGVTIRIMD LPDYNYCWKTFVSDQGGDEDYWPGHFAPWIKQYSLKL" or "SSKTGPVAVDPTL
  MOD_RES (20)..(247): CONT. FROM ABOVE: RRRIEPHEFEVFFDPRELRKETCLLYEINWGGRHSIWR HTSQNTNKHVEVNFIEKFTTERYFCPNTRCSITWFLSWSPCGECSRAITEFLSRYP NVTLFIYIARLYHLANPRNRQGLRDLISSGVTIQIMTEQESGYCWHNFVNYSPSNE SHWPRYPHLWVRLYVLELYCIILGLPPCLNILRRKQSQLTSFTIALQSCHYQRLPP
  MOD_RES (20)..(247): CONT. FROM ABOVE: HILWATGLK"
  See specification as filed for detailed description of substitutions and preferred embodiments
MKRTADGSEFESPKKKRKVXXXXXXXXXXXXXXXXXXXXXXXXXXXXXXXXXXXXXXXXXXXXXXXXXXXXXXXXXXXXXXXXXXXXXXXXXXXXXXXXXXXXXXXXXXXXXXXXXXXXXXXXXXXXXXXXXXXXXXXXXXXXXXXXXXXXXXXXXXXXXXXXXXXXXXXXXXXXXXXXXXXXXXXXXXXXXXXXXXXXXXXXXXXXXXXXXXXXXXXXXXXXXXXXXXXXXXXXXXXXXXXXXXXXSGGSSGGSSGSETPGTSESATPESSGGSSGGSDKKYSIGLAIGTNSVGWAVITDEYKVPSKKFKVLGNTDRHSIKKNLIGALLFDSGETAEATRLKRTARRRYTRRKNRICYLQEIFSNEMAKVDDSFFHRLEESFLVEEDKKHERHPIFGNIVDEVAYHEKYPTIYHLRKKLVDSTDKADLRLIYLALAHMIKFRGHFLIEGDLNPDNSDVDKLFIQLVQTYNQLFEENPINASGVDAKAILSARLSKSRRLENLIAQLPGEKKNGLFGNLIALSLGLTPNFKSNFDLAEDAKLQLSKDTYDDDLDNLLAQIGDQYADLFLAAKNLSDAILLSDILRVNTEITKAPLSASMIKRYDEHHQDLTLLKALVRQQLPEKYKEIFFDQSKNGYAGYIDGGASQEEFYKFIKPILEKMDGTEELLVKLNREDLLRKQRTFDNGSIPHQIHLGELHAILRRQEDFYPFLKDNREKIEKILTFRIPYYVGPLARGNSRFAWMTRKSEETITPWNFEEVVDKGASAQSFIERMTNFDKNLPNEKVLPKHSLLYEYFTVYNELTKVKYVTEGMRKPAFLSGEQKKAIVDLLFKTNRKVTVKQLKEDYFKKIECFDSVEISGVEDRFNASLGTYHDLLKIIKDKDFLDNEENEDILEDIVLTLTLFEDREMIEERLKTYAHLFDDKVMKQLKRRRYTGWGRLSRKLINGIRDKQSGKTILDFLKSDGFANRNFMQLIHDDSLTFKEDIQKAQVSGQGDSLHEHIANLAGSPAIKKGILQTVKVVDELVKVMGRHKPENIVIEMARENQTTQKGQKNSRERMKRIEEGIKELGSQILKEHPVENTQLQNEKLYLYYLQNGRDMYVDQELDINRLSDYDVDHIVPQSFLKDDSIDNKVLTRSDKNRGKSDNVPSEEVVKKMKNYWRQLLNAKLITQRKFDNLTKAERGGLSELDKAGFIKRQLVETRQITKHVAQILDSRMNTKYDENDKLIREVKVITLKSKLVSDFRKDFQFYKVREINNYHHAHDAYLNAVVGTALIKKYPKLESEFVYGDYKVYDVRKMIAKSEQEIGKATAKYFFYSNIMNFFKTEITLANGEIRKRPLIETNGETGEIVWDKGRDFATVRKVLSMPQVNIVKKTEVQTGGFSKESILPKRNSDKLIARKKDWDPKKYGGFDSPTVAYSVLVVAKVEKGKSKKLKSVKELLGITIMERSSFEKNPIDFLEAKGYKEVKKDLIIKLPKYSLFELENGRKRMLASAGELQKGNELALPSKYVNFLYLASHYEKLKGSPEDNEQKQLFVEQHKHYLDEIIEQISEFSKRVILADANLDKVLSAYNKHRDKPIREQAENIIHLFTLTNLGAPAAFKYFDTTIDRKRYTSTKEVLDATLIHQSITGLYETRIDLSQLGGDSGGSGGSGGSTNLSDIIEKETGKQLVIQESILMLPEEVEEVIGNKPESDILVHTAYDESTDENVMLLTSDAPEYKPWALVIQDSNGENKIKMLSGGSGGSGGSTNLSDIIEKETGKQLVIQESILMLPEEVEEVIGNKPESDILVHTAYDESTDENVMLLTSDAPEYKPWALVIQDSNGENKIKMLSGGSKRTADGSEFEPKKKRKV

SEQ ID NO: 387 - protein, 228 aa, Rattus sp.
SSETGPVAVDPTLRRRIEPHEFEVFFDPRELRKETCLLYEINWGGRHSIWRHTSQNTNKHVEVNFIEKFTTERYFCPNTRCSITWFLSWSPCGECSRAITEFLSRYPHVTLFIYIARLYHHADPRNRQGLRDLISSGVTIQIMTEQESGYCWRNFVNYSPSNEAHWPRYPHLWVRLYVLELYCIILGLPPCLNILRRKQPQLTFFTIALQSCHYQRLPPHILWATGLK

SEQ ID NO: 388 - protein, 228 aa, Artificial Sequence
  Description of Artificial Sequence: Synthetic polypeptide
SSETGPVAVDPTLRRRIEPHEFEVFFDPRELRKETCLLYEIKWGTSHKIWRHSSKNTTKHVEVNFIEKFTSERHFCPSTSCSITWFLSWSPCGECSKAITEFLSQHPNVTLVIYVARLYHHMDQQNRQGLRDLVNSGVTIQIMTAPEYDYCWRNFVNYPPGKEAHWPRYPPLWMKLYALELHAGILGLPPCLNILRRKQPQLTFFTIALQSCHYQRLPPHILWATGLK

SEQ ID NO: 389 - protein, 228 aa, Artificial Sequence
  Description of Artificial Sequence: Synthetic polypeptide
SSETGPVAVDPTLRRRIEPHEFEVFFDPRELRKEACLLYEIKWGTSHKIWRNSGKNTTKHVEVNFIEKFTSERHFCPSISCSITWFLSWSPCWECSKAIREFLSQHPNVTLVIYVARLFQHMDQQNRQGLRDLVNSGVTIQIMTASEYDHCWRNFVNYPPGKEAHWPRYPPLWMKLYALELHAGILGLPPCLNILRRKQPQLTFFTIALQSCHYQRLPPHILWATGLK

SEQ ID NO: 390 - protein, 228 aa, Artificial Sequence
  Description of Artificial Sequence: Synthetic polypeptide
SSETGPVAVDPTLRRRIEPEFFNRNYDPRELRKETYLLYEIKWGKESKIWRHTSNNRTQHAEVNFLENFFNELYFNPSTHCSITWFLSWSPCGECSKAIVEFLKEHPNVNLEIYVARLYLCEDERNRQGLRDLVNSGVTIRIMNLPDYNYCWRTFVSHQGGDEDYWPRHFAPWVRLYVLELYCIILGLPPCLNILRRKQPQLTFFTIALQSCHYQRLPPHILWATGLK

SEQ ID NO: 391 - protein, 228 aa, Artificial Sequence
  Description of Artificial Sequence: Synthetic polypeptide
SSETGPVAVDPTLRRRIEPFYFQFNNDPRACRRKTYLCYELKQDGSTWVWKRTLHNKGRHAEICFLEKISSLEKLDPAQHYRITWYMSWSPCSNCAQKIVDFLKEHPHVNLRIYVARLYYHEEERYQEGLRNLRRSGVSIRVMDLPDFEHCWETFVDNGGGPFQPWPGLEELNSKQLSRRLQAGILGLPPCLNILRRKQPQLTFFTIALQSCHYQRLPPHILWATGLK

SEQ ID NO: 392 - protein, 228 aa, Artificial Sequence
  Description of Artificial Sequence: Synthetic polypeptide
SSETGPVAVDPTLRRRIEPFHFQFNNDPRAYRRKTYLCYELKQDGSTWVLDRTLRNKGRHAEICFLDKINSWERLDPAQHYRVTWYMSWSPCSNCAQQVVDFLKEHPHVNLRIFAARLYYHEQRRYQEGLRSLRGSGVPVAVMTLPDFEHCWETFVDHGGRPFQPWDGLEELNSRSLSRRLQAGILGLPPCLNILRRKQPQLTFFTIALQSCHYQRLPPHILWATGLK

SEQ ID NO: 393 - protein, 159 aa, Artificial Sequence
  Description of Artificial Sequence: Synthetic polypeptide
EFFNRNYDPRELRKETYLLYEIKWGKESKIWRHWCTSNNRTQHAEVNFLENFFNELYFNPSTHCSITWFLSWSPCGECSKAIVEFLKEHPNVNLEIYVARLYLCEDERNRQGLRDLVNSGVTIRIMNLPDYNYCWRTFVSHQGGDEDYWPRHFAPWVRL

SEQ ID NO: 394 - protein, 167 aa, Artificial Sequence
  Description of Artificial Sequence: Synthetic polypeptide
FHFQFNNDPRAYRRKTYLCYELKQDGSTWVLDRGCTLRNKGRHAEICFLDKINSWERLDPAQHYRVTWYMSWSPCSNCAQQVVDFLKEHPHVNLRIFAARLYYHEQRRYQEGLRSLRGSGVPVAVMTLPDFEHCWETFVDHGGRPFQPWDGLEELNSRSLSRRLQAG

SEQ ID NO: 395 - protein, 161 aa, Artificial Sequence
  Description of Artificial Sequence: Synthetic polypeptide
FERNYDPRELRKETYLLYEIKWGKSGKLWRHWCQNNRTQHAEVYFLENIFNARRFNPSTHCSITWYLSWSPCAECSQKIVDFLKEHPNVNLEIYVARLYYHEDERNRQGLRDLVNSGVTIRIMDLPDYNYCWKTFVSDQGGDEDYWPGHFAPWIKQYSLKL

SEQ ID NO: 396 - protein, 166 aa, Artificial Sequence
  Description of Artificial Sequence: Synthetic polypeptide
FYFQFNNDPRACRRKTYLCYELKQDGSTWVWKRGCTLHNKGRHAEICFLEKISSLEKLDPAQHYRITWYMSWSPCSNCAQKIVDFLKEHPHVNLRIYVARLYYHEEERYQEGLRNLRRSGVSIRVMDLPDFEHCWETFVDNGGGPFQPWPGLEENSKQLSRRLQAG

SEQ ID NO: 397 - protein, 165 aa, Artificial Sequence
  Description of Artificial Sequence: Synthetic polypeptide
FYEEFNNTLKSCRHKTLLCFSLKQDENTTLWKWGYAHNNGRHAEILVLREIENYEKLDPAAKYRITLYMSYSPCNDCADKIVDFLKKHPNVNLNIKVSRLYYHEDEKYQEGLRNLKQPGVSLKVMDRSDFEECFDLFVDPGGGEFQPWPGLEEKSKQYSATLQAG

SEQ ID NO: 398 - protein, 162 aa, Artificial Sequence
  Description of Artificial Sequence: Synthetic polypeptide
SFERNYDPRELRKETYLLYEIKWGKSGKLWRHWCQNNRTQHAEVYFLENIFNARRFNPSTHCSITWYLSWSPCAECSQKIVDFLKEHPNVNLEIYVARLYYPENERNRQGLRDLVNSGVTIRIMDLPDYNYCWKTFVSDQGGDEDYWPGHFAPWIKQYSLKL

SEQ ID NO: 399 - protein, 228 aa, Artificial Sequence
  Description of Artificial Sequence: Synthetic polypeptide
SSKTGPVAVDPTLRRRIEPHEFEVFFDPRELRKETCLLYEINWGGRHSIWRHTSQNTNKHVEVNFIEKFTTERYFCPNTRCSITWFLSWSPCGECSRAITEFLSRYPNVTLFIYIARLYHLANPRNRQGLRDLISSGVTIQIMTEQESGYCWHNFVNYSPSNESHWPRYPHLWVRLYVLELYCIILGLPPCLNILRRKQSQLTSFTIALQSCHYQRLPPHILWATGLK

SEQ ID NO: 400 - protein, 1774 aa, Artificial Sequence
  Description of Artificial Sequence: Synthetic polypeptide
MSEVEFSHEYWMRHALTLAKRAWDEREVPVGAVLVHNNRVIGEGWNRPIGRHDPTAHAEIMALRQGGLVMQNYRLIDATYVTLEPCVMCAGAMIHSRIGRVVFGARDAKTGAAGSLMDVLHHPGMNHRVEITEGILADECAALLSDFFRMRRQEIKAQKKAQSSTDSGGSSGGSSGSETPGTSESATPESSGGSSGGSSEVEFSHEYWMRHALTLAKRAWDEREVPVGAVLVLNNRVIGEGWNRSIGLHDPTAHAEIMALRQGGLVMQNYRLIDATLYVTFEPCVMCAGAMIHSRIGRVVFGVRNAKTGAAGSLMDVLHYPGMNHRVEITEGILADECAALLCYFFRMRRQVFNAQKKAQSSTDSGGSSGGSSGSETPGTSESATPESSGGSSGGSDKKYSIGLAIGTNSVGWAVITDEYKVPSKKFKVLGNTDRHSIKKNLIGALLFDSGETAEATRLKRTARRRYTRRKNRICYLQEIFSNEMAKVDDSFFHRLEESFLVEEDKKHERHPIFGNIVDEVAYHEKYPTIYHLRKKLVDSTDKADLRLIYLALAHMIKFRGHFLIEGDLNPDNSDVDKLFIQLVQTYNQLFEENPINASGVDAKAILSARLSKSRRLENLIAQLPGEKKNGLFGNLIALSLGLTPNFKSNFDLAEDAKLQLSKDTYDDDLDNLLAQIGDQYADLFLAAKNLSDAILLSDILRVNTEITKAPLSASMIKRYDEHHQDLTLLKALVRQQLPEKYKEIFFDQSKNGYAGYIDGGASQEEFYKFIKPILEKMDGTEELLVKLNREDLLRKQRTFDNGSIPHQIHLGELHAILRRQEDFYPFLKDNREKIEKILTFRIPYYVGPLARGNSRFAWMTRKSEETITPWNFEEVVDKGASAQSFIERMTNFDKNLPNEKVLPKHSLLYEYFTVYNELTKVKYVTEGMRKPAFLSGEQKKAIVDLLFKTNRKVTVKQLKEDYFKKIECFDSVEISGVEDRFNASLGTYHDLLKIIKDKDFLDNEENEDILEDIVLTLTLFEDREMIEERLKTYAHLFDDKVMKQLKRRRYTGWGRLSRKLINGIRDKQSGKTILDFLKSDGFANRNFMQLIHDDSLTFKEDIQKAQVSGQGDSLHEHIANLAGSPAIKKGILQTVKVVDELVKVMGRHKPENIVIEMARENQTTQKGQKNSRERMKRIEEGIKELGSQILKEHPVENTQLQNEKLYLYYLQNGRDMYVDQELDINRLSDYDVDHIVPQSFLKDDSIDNKVLTRSDKNRGKSDNVPSEEVVKKMKNYWRQLLNAKLITQRKFDNLTKAERGGLSELDKAGFIKRQLVETRQITKHVAQILDSRMNTKYDENDKLIREVKVITLKSKLVSDFRKDFQFYKVREINNYHHAHDAYLNAVVGTALIKKYPKLESEFVYGDYKVYDVRKMIAKSEQEIGKATAKYFFYSNIMNFFKTEITLANGEIRKRPLIETNGETGEIVWDKGRDFATVRKVLSMPQVNIVKKTEVQTGGFSKESILPKRNSDKLIARKKDWDPKKYGGFDSPTVAYSVLVVAKVEKGKSKKLKSVKELLGITIMERSSFEKNPIDFLEAKGYKEVKKDLIIKLPKYSLFELENGRKRMLASAGELQKGNELALPSKYVNFLYLASHYEKLKGSPEDNEQKQLFVEQHKHYLDEIIEQISEFSKRVILADANLDKVLSAYNKHRDKPIREQAENIIHLFTLTNLGAPAAFKYFDTTIDRKRYTSTKEVLDATLIHQSITGLYETRIDLSQLGGDSGGSPKKKRKV

SEQ ID NO: 401 - protein, 1775 aa, Artificial Sequence
  Description of Artificial Sequence: Synthetic polypeptide
MSEVEFSHEYWMRHALTLAKRAWDEREVPVGAVLVHNNRVIGEGWNRPIGRHDPTAHAEIMALRQGGLVMQNYRLIDATLYVTLEPCVMCAGAMIHSRIGRVVFGARDAKTGAAGSLMDVLHHPGMNHRVEITEGILADECAALLSDFFRMRRQEIKAQKKAQSSTDSGGSSGGSSGSETPGTSESATPESSGGSSGGSSEVEFSHEYWMRHALTLAKRALDEREVPVGAVLVLNNRVIGEGWNRAIGLHDPTAHAEIMALRQGGLVMQNYRLIDATLYVTFEPCVMCAGAMIHSRIGRVVFGVRNAKTGAAGSLMDVLHYPGMNHRVEITEGILADECNALLCYFFRMRRQVFNAQKKAQSSTDSGGSSGGSSGSETPGTSESATPESSGGSSGGSDKKYSIGLAIGTNSVGWAVITDEYKVPSKKFKVLGNTDRHSIKKNLIGALLFDSGETAEATRLKRTARRRYTRRKNRICYLQEIFSNEMAKVDDSFFHRLEESFLVEEDKKHERHPIFGNIVDEVAYHEKYPTIYHLRKKLVDSTDKADLRLIYLALAHMIKFRGHFLIEGDLNPDNSDVDKLFIQLVQTYNQLFEENPINASGVDAKAILSARLSKSRRLENLIAQLPGEKKNGLFGNLIALSLGLTPNFKSNFDLAEDAKLQLSKDTYDDDLDNLLAQIGDQYADLFLAAKNLSDAILLSDILRVNTEITKAPLSASMIKRYDEHHQDLTLLKALVRQQLPEKYKEIFFDQSKNGYAGYIDGGASQEEFYKFIKPILEKMDGTEELLVKLNREDLLRKQRTFDNGSIPHQIHLGELHAILRRQEDFYPFLKDNREKIEKILTFRIPYYVGPLARGNSRFAWMTRKSEETITPWNFEEVVDKGASAQSFIERMTNFDKNLPNEKVLPKHSLLYEYFTVYNELTKVKYVTEGMRKPAFLSGEQKKAIVDLLFKTNRKVTVKQLKEDYFKKIECFDSVEISGVEDRFNASLGTYHDLLKIIKDKDFLDNEENEDILEDIVLTLTLFEDREMIEERLKTYAHLFDDKVMKQLKRRRYTGWGRLSRKLINGIRDKQSGKTILDFLKSDGFANRNFMQLIHDDSLTFKEDIQKAQVSGQGDSLHEHIANLAGSPAIKKGILQTVKVVDELVKVMGRHKPENIVIEMARENQTTQKGQKNSRERMKRIEEGIKELGSQILKEHPVENTQLQNEKLYLYYLQNGRDMYVDQELDINRLSDYDVDHIVPQSFLKDDSIDNKVLTRSDKNRGKSDNVPSEEVVKKMKNYWRQLLNAKLITQRKFDNLTKAERGGLSELDKAGFIKRQLVETRQITKHVAQILDSRMNTKYDENDKLIREVKVITLKSKLVSDFRKDFQFYKVREINNYHHAHDAYLNAVVGTALIKKYPKLESEFVYGDYKVYDVRKMIAKSEQEIGKATAKYFFYSNIMNFFKTEITLANGEIRKRPLIETNGETGEIVWDKGRDFATVRKVLSMPQVNIVKKTEVQTGGFSKESILPKRNSDKLIARKKDWDPKKYGGFDSPTVAYSVLVVAKVEKGKSKKLKSVKELLGITIMERSSFEKNPIDFLEAKGYKEVKKDLIIKLPKYSLFELENGRKRMLASAGELQKGNELALPSKYVNFLYLASHYEKLKGSPEDNEQKQLFVEQHKHYLDEIIEQISEFSKRVILADANLDKVLSAYNKHRDKPIREQAENIIHLFTLTNLGAPAAFKYFDTTIDRKRYTSTKEVLDATLIHQSITGLYETRIDLSQLGGDSGGSPKKKRKV

SEQ ID NO: 402 - protein, 1775 aa, Artificial Sequence
  Description of Artificial Sequence: Synthetic polypeptide
MSEVEFSHEYWMRHALTLAKRAWDEREVPVGAVLVHNNRVIGEGWNRPIGRHDPTAHAEIMALRQGGLVMQNYRLIDATLYVTLEPCVMCAGAMIHSRIGRVVFGARDAKTGAAGSLMDVLHHPGMNHRVEITEGILADECAALLSDFFRMRRQEIKAQKKAQSSTDSGGSSGGSSGSETPGTSESATPESSGGSSGGSSEVEFSHEYWMRHALTLAKRALDEREVPVGAVLVLNNRVIGEGWNRAIGLHDPTAHAEIMALRQGGLVMQNYRLIDATLYVTFEPCVMCAGAMIHSRIGRVVFGVRNAKTGAAGSLMDVLHYPGMNHRVEITEGILADECNALLCYFFRMPRQVFNAQKKAQSSTDSGGSSGGSSGSETPGTSESATPESSGGSSGGSDKKYSIGLAIGTNSVGWAVITDEYKVPSKKFKVLGNTDRHSIKKNLIGALLFDSGETAEATRLKRTARRRYTRRKNRICYLQEIFSNEMAKVDDSFFHRLEESFLVEEDKKHERHPIFGNIVDEVAYHEKYPTIYHLRKKLVDSTDKADLRLIYLALAHMIKFRGHFLIEGDLNPDNSDVDKLFIQLVQTYNQLFEENPINASGVDAKAILSARLSKSRRLENLIAQLPGEKKNGLFGNLIALSLGLTPNFKSNFDLAEDAKLQLSKDTYDDDLDNLLAQIGDQYADLFLAAKNLSDAILLSDILRVNTEITKAPLSASMIKRYDEHHQDLTLLKALVRQQLPEKYKEIFFDQSKNGYAGYIDGGASQEEFYKFIKPILEKMDGTEELLVKLNREDLLRKQRTFDNGSIPHQIHLGELHAILRRQEDFYPFLKDNREKIEKILTFRIPYYVGPLARGNSRFAWMTRKSEETITPWNFEEVVDKGASAQSFIERMTNFDKNLPNEKVLPKHSLLYEYFTVYNELTKVKYVTEGMRKPAFLSGEQKKAIVDLLFKTNRKVTVKQLKEDYFKKIECFDSVEISGVEDRFNASLGTYHDLLKIIKDKDFLDNEENEDILEDIVLTLTLFEDREMIEERLKTYAHLFDDKVMKQLKRRRYTGWGRLSRKLINGIRDKQSGKTILDFLKSDGFANRNFMQLIHDDSLTFKEDIQKAQVSGQGDSLHEHIANLAGSPAIKKGILQTVKVVDELVKVMGRHKPENIVIEMARENQTTQKGQKNSRERMKRIEEGIKELGSQILKEHPVENTQLQNEKLYLYYLQNGRDMYVDQELDINRLSDYDVDHIVPQSFLKDDSIDNKVLTRSDKNRGKSDNVPSEEVVKKMKNYWRQLLNAKLITQRKFDNLTKAERGGLSELDKAGFIKRQLVETRQITKHVAQILDSRMNTKYDENDKLIREVKVITLKSKLVSDFRKDFQFYKVREINNYHHAHDAYLNAVVGTALIKKYPKLESEFVYGDYKVYDVRKMIAKSEQEIGKATAKYFFYSNIMNFFKTEITLANGEIRKRPLIETNGETGEIVWDKGRDFATVRKVLSMPQVNIVKKTEVQTGGFSKESILPKRNSDKLIARKKDWDPKKYGGFDSPTVAYSVLVVAKVEKGKSKKLKSVKELLGITIMERSSFEKNPIDFLEAKGYKEVKKDLIIKLPKYSLFELENGRKRMLASAGELQKGNELALPSKYVNFLYLASHYEKLKGSPEDNEQKQLFVEQHKHYLDEIIEQISEFSKRVILADANLDKVLSAYNKHRDKPIREQAENIIHLFTLTNLGAPAAFKYFDTTIDRKRYTSTKEVLDATLIHQSITGLYETRIDLSQLGGDSGGSPKKKRKV

SEQ ID NO: 403 - protein, 1775 aa, Artificial Sequence
  Description of Artificial Sequence: Synthetic polypeptide
MSEVEFSHEYWMRHALTLAKRAWDEREVPVGAVLVHNNRVIGEGWNRPIGRHDPTAHAEIMALRQGGLVMQNYRLIDATLYVTLEPCVMCAGAMIHSRIGRVVFGARDAKTGAAGSLMDVLHHPGMNHRVEITEGILADECAALLSDFFRMRRQEIKAQKKAQSSTDSGGSSGGSSGSETPGTSESATPESSGGSSGGSSEVEFSHEYWMRHALTLAKRARDEREVPVGAVLVLNNRVIGEGWNRAIGLHDPTAHAEIMALRQGGLVMQNYRLIDATLYVTFEPCVMCAGAMIHSRIGRVVFGVRNAKTGAAGSLMDVLHYPGMNHRVEITEGILADECAALLCYFFRMPRQVFNAQKKAQSSTDSGGSSGGSSGSETPGTSESATPESSGGSSGGSDKKYSIGLAIGTNSVGWAVITDEYKVPSKKFKVLGNTDRHSIKKNLIGALLFDSGETAEATRLKRTARRRYTRRKNRICYLQEIFSNEMAKVDDSFFHRLEESFLVEEDKKHERHPIFGNIVDEVAYHEKYPTIYHLRKKLVDSTDKADLRLIYLALAHMIKFRGHFLIEGDLNPDNSDVDKLFIQLVQTYNQLFEENPINASGVDAKAILSARLSKSRRLENLIAQLPGEKKNGLFGNLIALSLGLTPNFKSNFDLAEDAKLQLSKDTYDDDLDNLLAQIGDQYADLFLAAKNLSDAILLSDILRVNTEITKAPLSASMIKRYDEHHQDLTLLKALVRQQLPEKYKEIFFDQSKNGYAGYIDGGASQEEFYKFIKPILEKMDGTEELLVKLNREDLLRKQRTFDNGSIPHQIHLGELHAILRRQEDFYPFLKDNREKIEKILTFRIPYYVGPLARGNSRFAWMTRKSEETITPWNFEEVVDKGASAQSFIERMTNFDKNLPNEKVLPKHSLLYEYFTVYNELTKVKYVTEGMRKPAFLSGEQKKAIVDLLFKTNRKVTVKQLKEDYFKKIECFDSVEISGVEDRFNASLGTYHDLLKIIKDKDFLDNEENEDILEDIVLTLTLFEDREMIEERLKTYAHLFDDKVMKQLKRRRYTGWGRLSRKLINGIRDKQSGKTILDFLKSDGFANRNFMQLIHDDSLTFKEDIQKAQVSGQGDSLHEHIANLAGSPAIKKGILQTVKVVDELVKVMGRHKPENIVIEMARENQTTQKGQKNSRERMKRIEEGIKELGSQILKEHPVENTQLQNEKLYLYYLQNGRDMYVDQELDINRLSDYDVDHIVPQSFLKDDSIDNKVLTRSDKNRGKSDNVPSEEVVKKMKNYWRQLLNAKLITQRKFDNLTKAERGGLSELDKAGFIKRQLVETRQITKHVAQILDSRMNTKYDENDKLIREVKVITLKSKLVSDFRKDFQFYKVREINNYHHAHDAYLNAVVGTALIKKYPKLESEFVYGDYKVYDVRKMIAKSEQEIGKATAKYFFYSNIMNFFKTEITLANGEIRKRPLIETNGETGEIVWDKGRDFATVRKVLSMPQVNIVKKTEVQTGGFSKESILPKRNSDKLIARKKDWDPKKYGGFDSPTVAYSVLVVAKVEKGKSKKLKSVKELLGITIMERSSFEKNPIDFLEAKGYKEVKKDLIIKLPKYSLFELENGRKRMLASAGELQKGNELALPSKYVNFLYLASHYEKLKGSPEDNEQKQLFVEQHKHYLDEIIEQISEFSKRVILADANLDKVLSAYNKHRDKPIREQAENIIHLFTLTNLGAPAAFKYFDTTIDRKRYTSTKEVLDATLIHQSITGLYETRIDLSQLGGDSGGSPKKKRKV

SEQ ID NO: 404 - protein, 1803 aa, Artificial Sequence
  Description of Artificial Sequence: Synthetic polypeptide
MKRTADGSEFESPKKKRKVSEVEFSHEYWMRHALTLAKRAWDEREVPVGAVLVHNNRVIGEGWNRPIGRHDPTAHAEIMALRQGGLVMQNYRLIDATLYVTLEPCVMCAGAMIHSRIGRVVFGARDAKTGAAGSLMDVLHHPGMNHRVEITEGILADECAALLSDFFRMRRQEIKAQKKAQSSTDSGGSSGGSSGSETPGTSESATPESSGGSSGGSSEVEFSHEYWMRHALTLAKRARDEREVPVGAVLVLNNRVIGEGWNRAIGLHDPTAHAEIMALRQGGLVMQNYRLIDATLYVTFEPCVMCAGAMIHSRIGRVVFGVRNAKTGAAGSLMDVLHYPGMNHRVEITEGILADECAALLCYFFRMPRQVFNAQKKAQSSTDSGGSSGGSSGSETPGTSESATPESSGGSSGGSDKKYSIGLAIGTNSVGWAVITDEYKVPSKKFKVLGNTDRHSIKKNLIGALLFDSGETAEATRLKRTARRRYTRRKNRICYLQEIFSNEMAKVDDSFFHRLEESFLVEEDKKHERHPIFGNIVDEVAYHEKYPTIYHLRKKLVDSTDKADLRLIYLALAHMIKFRGHFLIEGDLNPDNSDVDKLFIQLVQTYNQLFEENPINASGVDAKAILSARLSKSRRLENLIAQLPGEKKNGLFGNLIALSLGLTPNFKSNFDLAEDAKLQLSKDTYDDDLDNLLAQIGDQYADLFLAAKNLSDAILLSDILRVNTEITKAPLSASMIKRYDEHHQDLTLLKALVRQQLPEKYKEIFFDQSKNGYAGYIDGGASQEEFYKFIKPILEKMDGTEELLVKLNREDLLRKQRTFDNGSIPHQIHLGELHAILRRQEDFYPFLKDNREKIEKILTFRIPYYVGPLARGNSRFAWMTRKSEETITPWNFEEVVDKGASAQSFIERMTNFDKNLPNEKVLPKHSLLYEYFTVYNELTKVKYVTEGMRKPAFLSGEQKKAIVDLLFKTNRKVTVKQLKEDYFKKIECFDSVEISGVEDRFNASLGTYHDLLKIIKDKDFLDNEENEDILEDIVLTLTLFEDREMIEERLKTYAHLFDDKVMKQLKRRRYTGWGRLSRKLINGIRDKQSGKTILDFLKSDGFANRNFMQLIHDDSLTFKEDIQKAQVSGQGDSLHEHIANLAGSPAIKKGILQTVKVVDELVKVMGRHKPENIVIEMARENQTTQKGQKNSRERMKRIEEGIKELGSQILKEHPVENTQLQNEKLYLYYLQNGRDMYVDQELDINRLSDYDVDHIVPQSFLKDDSIDNKVLTRSDKNRGKSDNVPSEEVVKKMKNYWRQLLNAKLITQRKFDNLTKAERGGLSELDKAGFIKRQLVETRQITKHVAQILDSRMNTKYDENDKLIREVKVITLKSKLVSDFRKDFQFYKVREINNYHHAHDAYLNAVVGTALIKKYPKLESEFVYGDYKVYDVRKMIAKSEQEIGKATAKYFFYSNIMNFFKTEITLANGEIRKRPLIETNGETGEIVWDKGRDFATVRKVLSMPQVNIVKKTEVQTGGFSKESILPKRNSDKLIARKKDWDPKKYGGFDSPTVAYSVLVVAKVEKGKSKKLKSVKELLGITIMERSSFEKNPIDFLEAKGYKEVKKDLIIKLPKYSLFELENGRKRMLASAGELQKGNELALPSKYVNFLYLASHYEKLKGSPEDNEQKQLFVEQHKHYLDEIIEQISEFSKRVILADANLDKVLSAYNKHRDKPIREQAENIIHLFTLTNLGAPAAFKYFDTTIDRKRYTSTKEVLDATLIHQSITGLYETRIDLSQLGGDSGGSKRTADGSEFEPKKKRKV

SEQ ID NO: 405 - protein, 1877 aa, Artificial Sequence
  Description of Artificial Sequence: Synthetic polypeptide
MKRTADGSEFESPKKKRKVSEVEFSHEYWMRHALTLAKRARDEREVPVGAVLVLNNRVIGEGWNRAIGLHDPTAHAEIMALRQGGLVMQNYRLIDATLYVTFEPCVMCAGAMIHSRIGRVVFGVRNAKTGAAGSLMDVLHYPGMNHRVEITEGILADECAALLCYFFRMPRQVFNAQKKAQSSTDSGGSSGGSSGSETPGTSESATPESSGGSSGGSDKKYSIGLAIGTNSVGWAVITDEYKVPSKKFKVLGNTDRHSIKKNLIGALLFDSGETAEATRLKRTARRRYTRRKNRICYLQEIFSNEMAKVDDSFFHRLEESFLVEEDKKHERHPIFGNIVDEVAYHEKYPTIYHLRKKLVDSTDKADLRLIYLALAHMIKFRGHFLIEGDLNPDNSDVDKLFIQLVQTYNQLFEENPINASGVDAKAILSARLSKSRRLENLIAQLPGEKKNGLFGNLIALSLGLTPNFKSNFDLAEDAKLQLSKDTYDDDLDNLLAQIGDQYADLFLAAKNLSDAILLSDILRVNTEITKAPLSASMIKRYDEHHQDLTLLKALVRQQLPEKYKEIFFDQSKNGYAGYIDGGASQEEFYKFIKPILEKMDGTEELLVKLNREDLLRKQRTFDNGSIPHQIHLGELHAILRRQEDFYPFLKDNREKIEKILTFRIPYYVGPLARGNSRFAWMTRKSEETITPWNFEEVVDKGASAQSFIERMTNFDKNLPNEKVLPKHSLLYEYFTVYNELTKVKYVTEGMRKPAFLSGEQKKAIVDLLFKTNRKVTVKQLKEDYFKKIECFDSVEISGVEDRFNASLGTYHDLLKIIKDKDFLDNEENEDILEDIVLTLTLFEDREMIEERLKTYAHLFDDKVMKQLKRRRYTGWGRLSRKLINGIRDKQSGKTILDFLKSDGFANRNFMQLIHDDSLTFKEDIQKAQVSGQGDSLHEHIANLAGSPAIKKGILQTVKVVDELVKVMGRHKPENIVIEMARENQTTQKGQKNSRERMKRIEEGIKELGSQILKEHPVENTQLQNEKLYLYYLQNGRDMYVDQELDINRLSDYDVDHIVPQSFLKDDSIDNKVLTRSDKNRGKSDNVPSEEVVKKMKNYWRQLLNAKLITQRKFDNLTKAERGGLSELDKAGFIKRQLVETRQITKHVAQILDSRMNTKYDENDKLIREVKVITLKSKLVSDFRKDFQFYKVREINNYHHAHDAYLNAVVGTALIKKYPKLESEFVYGDYKVYDVRKMIAKSEQEIGKATAKYFFYSNIMNFFKTEITLANGEIRKRPLIETNGETGEIVWDKGRDFATVRKVLSMPQVNIVKKTEVQTGGFSKESILPKRNSDKLIARKKDWDPKKYGGFDSPTVAYSVLVVAKVEKGKSKKLKSVKELLGITIMERSSFEKNPIDFLEAKGYKEVKKDLIIKLPKYSLFELENGRKRMLASAGELQKGNELALPSKYVNFLYLASHYEKLKGSPEDNEQKQLFVEQHKHYLDEIIEQISEFSKRVILADANLDKVLSAYNKHRDKPIREQAENIIHLFTLTNLGAPAAFKYFDTTIDRKRYTSTKEVLDATLIHQSITGLYETRIDLSQLGGDSGGSKRTADGSEFEPKKKRKVGSGATNFSLLKQAGDVEENPGPMVSKGEELFTGVVPILVELDGDVNGHKFSVSGEGEGDATYGKLTLKFICTTGKLPVPWPTLVTTLTYGVQCFSRYPDHMKQHDFFKSAMPEGYVQERTIFFKDDGNYKTRAEVKFEGDTLVNRIELKGIDFKEDGNILGHKLEYNYNSHNVYIMADKQKNGIKVNFKIRHNIEDGSVQLADHYQQNTPIGDGPVLLPDNHYLSTQSALSKDPNEKRDHMVLLEFVTAAGITLGMDELYKSGGSPKKKRKV

SEQ ID NO: 406 - protein, 1877 aa, Artificial Sequence
  Description of Artificial Sequence: Synthetic polypeptide
MKRTADGSEFESPKKKRKVSEVEFSHEYWMRHALTLAKRARDEREVPVGAVLVLNNRVIGEGWNRAIGLHDPTAHAEIMALRQGGLVMQNYRLIDATLYGTFEPCVMCAGAMIHSRIGRVVFGVRNAKTGAAGSLMDVLHYPGMNHRVEITEGILADECAALLCYFFRMPRQVFNAQKKAQSSTDSGGSSGGSSGSETPGTSESATPESSGGSSGGSDKKYSIGLAIGTNSVGWAVITDEYKVPSKKFKVLGNTDRHSIKKNLIGALLFDSGETAEATRLKRTARRRYTRRKNRICYLQEIFSNEMAKVDDSFFHRLEESFLVEEDKKHERHPIFGNIVDEVAYHEKYPTIYHLRKKLVDSTDKADLRLIYLALAHMIKFRGHFLIEGDLNPDNSDVDKLFIQLVQTYNQLFEENPINASGVDAKAILSARLSKSRRLENLIAQLPGEKKNGLFGNLIALSLGLTPNFKSNFDLAEDAKLQLSKDTYDDDLDNLLAQIGDQYADLFLAAKNLSDAILLSDILRVNTEITKAPLSASMIKRYDEHHQDLTLLKALVRQQLPEKYKEIFFDQSKNGYAGYIDGGASQEEFYKFIKPILEKMDGTEELLVKLNREDLLRKQRTFDNGSIPHQIHLGELHAILRRQEDFYPFLKDNREKIEKILTFRIPYYVGPLARGNSRFAWMTRKSEETITPWNFEEVVDKGASAQSFIERMTNFDKNLPNEKVLPKHSLLYEYFTVYNELTKVKYVTEGMRKPAFLSGEQKKAIVDLLFKTNRKVTVKQLKEDYFKKIECFDSVEISGVEDRFNASLGTYHDLLKIIKDKDFLDNEENEDILEDIVLTLTLFEDREMIEERLKTYAHLFDDKVMKQLKRRRYTGWGRLSRKLINGIRDKQSGKTILDFLKSDGFANRNFMQLIHDDSLTFKEDIQKAQVSGQGDSLHEHIANLAGSPAIKKGILQTVKVVDELVKVMGRHKPENIVIEMARENQTTQKGQKNSRERMKRIEEGIKELGSQILKEHPVENTQLQNEKLYLYYLQNGRDMYVDQELDINRLSDYDVDHIVPQSFLKDDSIDNKVLTRSDKNRGKSDNVPSEEVVKKMKNYWRQLLNAKLITQRKFDNLTKAERGGLSELDKAGFIKRQLVETRQITKHVAQILDSRMNTKYDENDKLIREVKVITLKSKLVSDFRKDFQFYKVREINNYHHAHDAYLNAVVGTALIKKYPKLESEFVYGDYKVYDVRKMIAKSEQEIGKATAKYFFYSNIMNFFKTEITLANGEIRKRPLIETNGETGEIVWDKGRDFATVRKVLSMPQVNIVKKTEVQTGGFSKESILPKRNSDKLIARKKDWDPKKYGGFDSPTVAYSVLVVAKVEKGKSKKLKSVKELLGITIMERSSFEKNPIDFLEAKGYKEVKKDLIIKLPKYSLFELENGRKRMLASAGELQKGNELALPSKYVNFLYLASHYEKLKGSPEDNEQKQLFVEQHKHYLDEIIEQISEFSKRVILADANLDKVLSAYNKHRDKPIREQAENIIHLFTLTNLGAPAAFKYFDTTIDRKRYTSTKEVLDATLIHQSITGLYETRIDLSQLGGDSGGSKRTADGSEFEPKKKRKVGSGATNFSLLKQAGDVEENPGPMVSKGEELFTGVVPILVELDGDVNGHKFSVSGEGEGDATYGKLTLKFICTTGKLPVPWPTLVTTLTYGVQCFSRYPDHMKQHDFFKSAMPEGYVQERTIFFKDDGNYKTRAEVKFEGDTLVNRIELKGIDFKEDGNILGHKLEYNYNSHNVYIMADKQKNGIKVNFKIRHNIEDGSVQLADHYQQNTPIGDGPVLLPDNHYLSTQSALSKDPNEKRDHMVLLEFVTAAGITLGMDELYKSGGSPKKKRKV

SEQ ID NO: 407 - protein, 1877 aa, Artificial Sequence
  Description of Artificial Sequence: Synthetic polypeptide
MKRTADGSEFESPKKKRKVSEVEFSHEYWMRHALTLAAAARDEREVPVGAVLVLNNRVIGEGWNRAIGLHDPTAHAEIMALRQGGLVMQNYRLIDATLYVTFEPCVMCAGAMIHSRIGRVVFGVRNAKTGAAGSLMDVLHYPGMNHRVEITEGILADECAALLCYFFRMPRQVFNAQKKAQSSTDSGGSSGGSSGSETPGTSESATPESSGGSSGGSDKKYSIGLAIGTNSVGWAVITDEYKVPSKKFKVLGNTDRHSIKKNLIGALLFDSGETAEATRLKRTARRRYTRRKNRICYLQEIFSNEMAKVDDSFFHRLEESFLVEEDKKHERHPIFGNIVDEVAYHEKYPTIYHLRKKLVDSTDKADLRLIYLALAHMIKFRGHFLIEGDLNPDNSDVDKLFIQLVQTYNQLFEENPINASGVDAKAILSARLSKSRRLENLIAQLPGEKKNGLFGNLIALSLGLTPNFKSNFDLAEDAKLQLSKDTYDDDLDNLLAQIGDQYADLFLAAKNLSDAILLSDILRVNTEITKAPLSASMIKRYDEHHQDLTLLKALVRQQLPEKYKEIFFDQSKNGYAGYIDGGASQEEFYKFIKPILEKMDGTEELLVKLNREDLLRKQRTFDNGSIPHQIHLGELHAILRRQEDFYPFLKDNREKIEKILTFRIPYYVGPLARGNSRFAWMTRKSEETITPWNFEEVVDKGASAQSFIERMTNFDKNLPNEKVLPKHSLLYEYFTVYNELTKVKYVTEGMRKPAFLSGEQKKAIVDLLFKTNRKVTVKQLKEDYFKKIECFDSVEISGVEDRFNASLGTYHDLLKIIKDKDFLDNEENEDILEDIVLTLTLFEDREMIEERLKTYAHLFDDKVMKQLKRRRYTGWGRLSRKLINGIRDKQSGKTILDFLKSDGFANRNFMQLIHDDSLTFKEDIQKAQVSGQGDSLHEHIANLAGSPAIKKGILQTVKVVDELVKVMGRHKPENIVIEMARENQTTQKGQKNSRERMKRIEEGIKELGSQILKEHPVENTQLQNEKLYLYYLQNGRDMYVDQELDINRLSDYDVDHIVPQSFLKDDSIDNKVLTRSDKNRGKSDNVPSEEVVKKMKNYWRQLLNAKLITQRKFDNLTKAERGGLSELDKAGFIKRQLVETRQITKHVAQILDSRMNTKYDENDKLIREVKVITLKSKLVSDFRKDFQFYKVREINNYHHAHDAYLNAVVGTALIKKYPKLESEFVYGDYKVYDVRKMIAKSEQEIGKATAKYFFYSNIMNFFKTEITLANGEIRKRPLIETNGETGEIVWDKGRDFATVRKVLSMPQVNIVKKTEVQTGGFSKESILPKRNSDKLIARKKDWDPKKYGGFDSPTVAYSVLVVAKVEKGKSKKLKSVKELLGITIMERSSFEKNPIDFLEAKGYKEVKKDLIIKLPKYSLFELENGRKRMLASAGELQKGNELALPSKYVNFLYLASHYEKLKGSPEDNEQKQLFVEQHKHYLDEIIEQISEFSKRVILADANLDKVLSAYNKHRDKPIREQAENIIHLFTLTNLGAPAAFKYFDTTIDRKRYTSTKEVLDATLIHQSITGLYETRIDLSQLGGDSGGSKRTADGSEFEPKKKRKVGSGATNFSLLKQAGDVEENPGPMVSKGEELFTGVVPILVELDGDVNGHKFSVSGEGEGDATYGKLTLKFICTTGKLPVPWPTLVTTLTYGVQCFSRYPDHMKQHDFFKSAMPEGYVQERTIFFKDDGNYKTRAEVKFEGDTLVNRIELKGIDFKEDGNILGHKLEYNYNSHNVYIMADKQKNGIKVNFKIRHNIEDGSVQLADHYQQNTPIGDGPVLLPDNHYLSTQSALSKDPNEKRDHMVLLEFVTAAGITLGMDELYKSGGSPKKKRKV

SEQ ID NO: 408 - protein, 1877 aa, Artificial Sequence
  Description of Artificial Sequence: Synthetic polypeptide
MKRTADGSEFESPKKKRKVSEVEFSHEYWMRHALTLAKRARDEREVPVGAVLVLNNRVIGEGWNRAIGLHDPTAHAEIMALRQGGLVMQNYRLIDATLYVTFEPCVMCAGAMIHSRIGRVVFGWRNAKTGAAGSLMDVLHYPGMNHRVEITEGILADECAALLCYFFRMPRQVFNAQKKAQSSTDSGGSSGGSSGSETPGTSESATPESSGGSSGGSDKKYSIGLAIGTNSVGWAVITDEYKVPSKKFKVLGNTDRHSIKKNLIGALLFDSGETAEATRLKRTARRRYTRRKNRICYLQEIFSNEMAKVDDSFFHRLEESFLVEEDKKHERHPIFGNIVDEVAYHEKYPTIYHLRKKLVDSTDKADLRLIYLALAHMIKFRGHFLIEGDLNPDNSDVDKLFIQLVQTYNQLFEENPINASGVDAKAILSARLSKSRRLENLIAQLPGEKKNGLFGNLIALSLGLTPNFKSNFDLAEDAKLQLSKDTYDDDLDNLLAQIGDQYADLFLAAKNLSDAILLSDILRVNTEITKAPLSASMIKRYDEHHQDLTLLKALVRQQLPEKYKEIFFDQSKNGYAGYIDGGASQEEFYKFIKPILEKMDGTEELLVKLNREDLLRKQRTFDNGSIPHQIHLGELHAILRRQEDFYPFLKDNREKIEKILTFRIPYYVGPLARGNSRFAWMTRKSEETITPWNFEEVVDKGASAQSFIERMTNFDKNLPNEKVLPKHSLLYEYFTVYNELTKVKYVTEGMRKPAFLSGEQKKAIVDLLFKTNRKVTVKQLKEDYFKKIECFDSVEISGVEDRFNASLGTYHDLLKIIKDKDFLDNEENEDILEDIVLTLTLFEDREMIEERLKTYAHLFDDKVMKQLKRRRYTGWGRLSRKLINGIRDKQSGKTILDFLKSDGFANRNFMQLIHDDSLTFKEDIQKAQVSGQGDSLHEHIANLAGSPAIKKGILQTVKVVDELVKVMGRHKPENIVIEMARENQTTQKGQKNSRERMKRIEEGIKELGSQILKEHPVENTQLQNEKLYLYYLQNGRDMYVDQELDINRLSDYDVDHIVPQSFLKDDSIDNKVLTRSDKNRGKSDNVPSEEVVKKMKNYWRQLLNAKLITQRKFDNLTKAERGGLSELDKAGFIKRQLVETRQITKHVAQILDSRMNTKYDENDKLIREVKVITLKSKLVSDFRKDFQFYKVREINNYHHAHDAYLNAVVGTALIKKYPKLESEFVYGDYKVYDVRKMIAKSEQEIGKATAKYFFYSNIMNFFKTEITLANGEIRKRPLIETNGETGEIVWDKGRDFATVRKVLSMPQVNIVKKTEVQTGGFSKESILPKRNSDKLIARKKDWDPKKYGGFDSPTVAYSVLVVAKVEKGKSKKLKSVKELLGITIMERSSFEKNPIDFLEAKGYKEVKKDLIIKLPKYSLFELENGRKRMLASAGELQKGNELALPSKYVNFLYLASHYEKLKGSPEDNEQKQLFVEQHKHYLDEIIEQISEFSKRVILADANLDKVLSAYNKHRDKPIREQAENIIHLFTLTNLGAPAAFKYFDTTIDRKRYTSTKEVLDATLIHQSITGLYETRIDLSQLGGDSGGSKRTADGSEFEPKKKRKVGSGATNFSLLKQAGDVEENPGPMVSKGEELFTGVVPILVELDGDVNGHKFSVSGEGEGDATYGKLTLKFICTTGKLPVPWPTLVTTLTYGVQCFSRYPDHMKQHDFFKSAMPEGYVQERTIFFKDDGNYKTRAEVKFEGDTLVNRIELKGIDFKEDGNILGHKLEYNYNSHNVYIMADKQKNGIKVNFKIRHNIEDGSVQLADHYQQNTPIGDGPVLLPDNHYLSTQSALSKDPNEKRDHMVLLEFVTAAGITLGMDELYKSGGSPKKKRKV

SEQ ID NO: 409 - protein, 1803 aa, Artificial Sequence
  Description of Artificial Sequence: Synthetic polypeptide
  MOD_RES (218)..(383): This region may encompass one of the following sequences: "SEVEFSHEYWMRHALTLAKRARDEREVPVGAVLVLNNRVIGEGWNRAIGLHDPTAH AEIMALRQGGLVMQNYRLIDATLYVTFEPCVMCAGAMIHSRIGRVVFGVRNSKRGAA GSLMNVLNYPGMNHRVEITEGILADECAALLCDFYRMPRQVFNAQKKAQSSIN" or
  MOD_RES (218)..(383): CONT. FROM ABOVE: "SEVEFSHEYWMRHALTLAKRARDEREVPVGAVLVLNNR VIGEGWNRAIGLHDPTAHAEIMALRQGGLVMQNYRLIDATLYGTFEPCVMCAGAMIH SRIGRVVFGVRNSKRGAAGSLMNVLNYPGMNHRVEITEGILADECAALLCDFYRMPR QVFNAQKKAQSSIN" or "SEVEFSHEYWMRHALTLAAAARDEREVPVGAVLVLNN
  MOD_RES (218)..(383): CONT. FROM ABOVE: RVIGEGWNRAIGLHDPTAHAEIMALRQGGLVMQNYRLID ATLYVTFEPCVMCAGAMIHSRIGRVVFGVRNSKRGAAGSLMNVLNYPGMNHRVEITE GILADECAALLCDFYRMPRQVFNAQKKAQSSIN" or "SEVEFSHEYWMRHALTLA KRARDEREVPVGAVLVLNNRVIGEGWNRAIGLHDPTAHAEIMALRQGGLVMQNYRLI
  MOD_RES (218)..(383): CONT. FROM ABOVE: DATLYVTFEPCVMCAGAMIHSRIGRVVFGVRNAKTGAAG SLMDVLHHPGMNHRVEITEGILADECAALLCRFFRMPRRVFNAQKKAQSSTD" or "SEVEFSHEYWMRHALTLAKRARDEREVPVGAVLVLNNRVIGEGWNRAIGLHDPTAH AEIMALRQGGLVMQNYRLYDATLYVTFEPCVMCAGAMIHSRIGRVVFGVRNAKTGAA
  MOD_RES (218)..(383): CONT. FROM ABOVE: GSLMDVLHHPGMNHRVEITEGILADECAALLCRFFRMPR RVFNAQKKAQSSTD" or "SEVEFSHEYWMRHALTLAKRARDEREVPVGAVLVLNN RVIGEGWNRAIGLHDPTAHAEIMALRQGGLVMQNYRLIDATLYSTFEPCVMCAGAMI HSRIGRVVFGVRNAKTGAAGSLMDVLHYPGMNHRVEITEGILADECAALLCYFFRMP
  MOD_RES (218)..(383): CONT. FROM ABOVE: RRVFNAQKKAQSSTD" or "SEVEFSHEYWMRHALTLA KRARDEREVPVGAVLVLNNRVIGEGWNRAIGLHDPTAHAEIMALRQGGLVMQNYRLY DATLYSTFEPCVMCAGAMIHSRIGRVVFGVRNAKTGAAGSLMDVLHHPGMNHRVEIT EGILADECAALLCRFFRMPRRVFNAQKKAQSSTD"
  See specification as filed for detailed description of substitutions and preferred embodiments
MKRTADGSEFESPKKKRKVSEVEFSHEYWMRHALTLAKRAWDEREVPVGAVLVHNNRVIGEGWNRPIGRHDPTAHAEIMALRQGGLVMQNYRLIDATLYVTLEPCVMCAGAMIHSRIGRVVFGARDAKTGAAGSLMDVLHHPGMNHRVEITEGILADECAALLSDFFRMRRQEIKAQKKAQSSTDSGGSSGGSSGSETPGTSESATPESSGGSSGGSXXXXXXXXXXXXXXXXXXXXXXXXXXXXXXXXXXXXXXXXXXXXXXXXXXXXXXXXXXXXXXXXXXXXXXXXXXXXXXXXXXXXXXXXXXXXXXXXXXXXXXXXXXXXXXXXXXXXXXXXXXXXXXXXXXXXXXXXXXXXXXXXXXXXXXXXXXXXXXXXXXXXXXSGGSSGGSSGSETPGTSESATPESSGGSSGGSDKKYSIGLAIGTNSVGWAVITDEYKVPSKKFKVLGNTDRHSIKKNLIGALLFDSGETAEATRLKRTARRRYTRRKNRICYLQEIFSNEMAKVDDSFFHRLEESFLVEEDKKHERHPIFGNIVDEVAYHEKYPTIYHLRKKLVDSTDKADLRLIYLALAHMIKFRGHFLIEGDLNPDNSDVDKLFIQLVQTYNQLFEENPINASGVDAKAILSARLSKSRRLENLIAQLPGEKKNGLFGNLIALSLGLTPNFKSNFDLAEDAKLQLSKDTYDDDLDNLLAQIGDQYADLFLAAKNLSDAILLSDILRVNTEITKAPLSASMIKRYDEHHQDLTLLKALVRQQLPEKYKEIFFDQSKNGYAGYIDGGASQEEFYKFIKPILEKMDGTEELLVKLNREDLLRKQRTFDNGSIPHQIHLGELHAILRRQEDFYPFLKDNREKIEKILTFRIPYYVGPLARGNSRFAWMTRKSEETITPWNFEEVVDKGASAQSFIERMTNFDKNLPNEKVLPKHSLLYEYFTVYNELTKVKYVTEGMRKPAFLSGEQKKAIVDLLFKTNRKVTVKQLKEDYFKKIECFDSVEISGVEDRFNASLGTYHDLLKIIKDKDFLDNEENEDILEDIVLTLTLFEDREMIEERLKTYAHLFDDKVMKQLKRRRYTGWGRLSRKLINGIRDKQSGKTILDFLKSDGFANRNFMQLIHDDSLTFKEDIQKAQVSGQGDSLHEHIANLAGSPAIKKGILQTVKVVDELVKVMGRHKPENIVIEMARENQTTQKGQKNSRERMKRIEEGIKELGSQILKEHPVENTQLQNEKLYLYYLQNGRDMYVDQELDINRLSDYDVDHIVPQSFLKDDSIDNKVLTRSDKNRGKSDNVPSEEVVKKMKNYWRQLLNAKLITQRKFDNLTKAERGGLSELDKAGFIKRQLVETRQITKHVAQILDSRMNTKYDENDKLIREVKVITLKSKLVSDFRKDFQFYKVREINNYHHAHDAYLNAVVGTALIKKYPKLESEFVYGDYKVYDVRKMIAKSEQEIGKATAKYFFYSNIMNFFKTEITLANGEIRKRPLIETNGETGEIVWDKGRDFATVRKVLSMPQVNIVKKTEVQTGGFSKESILPKRNSDKLIARKKDWDPKKYGGFDSPTVAYSVLVVAKVEKGKSKKLKSVKELLGITIMERSSFEKNPIDFLEAKGYKEVKKDLIIKLPKYSLFELENGRKRMLASAGELQKGNELALPSKYVNFLYLASHYEKLKGSPEDNEQKQLFVEQHKHYLDEIIEQISEFSKRVILADANLDKVLSAYNKHRDKPIREQAENIIHLFTLTNLGAPAAFKYFDTTIDRKRYTSTKEVLDATLIHQSITGLYETRIDLSQLGGDSGGSKRTADGSEFEPKKKRKV

SEQ ID NO: 410 - protein, 1605 aa, Artificial Sequence
  Description of Artificial Sequence: Synthetic polypeptide
  MOD_RES (20)..(185): This region may encompass one of the following sequences: "SEVEFSHEYWMRHALTLAKRARDEREVPVGAVLVLNNRVIGEGWNRAIGLHDPTAH AEIMALRQGGLVMQNYRLIDATLYVTFEPCVMCAGAMIHSRIGRVVFGVRNSKRGAA GSLMNVLNYPGMNHRVEITEGILADECAALLCDFYRMPRQVFNAQKKAQSSIN" or
  MOD_RES (20)..(185): CONT. FROM ABOVE: "SEVEFSHEYWMRHALTLAKRARDEREVPVGAVLVLNNR VIGEGWNRAIGLHDPTAHAEIMALRQGGLVMQNYRLIDATLYGTFEPCVMCAGAMIH SRIGRVVFGVRNSKRGAAGSLMNVLNYPGMNHRVEITEGILADECAALLCDFYRMPR QVFNAQKKAQSSIN" or "SEVEFSHEYWMRHALTLAAAARDEREVPVGAVLVLNN
  MOD_RES (20)..(185): CONT. FROM ABOVE: RVIGEGWNRAIGLHDPTAHAEIMALRQGGLVMQNYRLID ATLYVTFEPCVMCAGAMIHSRIGRVVFGVRNSKRGAAGSLMNVLNYPGMNHRVEITE GILADECAALLCDFYRMPRQVFNAQKKAQSSIN" or "SEVEFSHEYWMRHALTLA KRARDEREVPVGAVLVLNNRVIGEGWNRAIGLHDPTAHAEIMALRQGGLVMQNYRLI
  MOD_RES (20)..(185): CONT. FROM ABOVE: DATLYVTFEPCVMCAGAMIHSRIGRVVFGVRNAKTGAAG SLMDVLHHPGMNHRVEITEGILADECAALLCRFFRMPRRVFNAQKKAQSSTD" or "SEVEFSHEYWMRHALTLAKRARDEREVPVGAVLVLNNRVIGEGWNRAIGLHDPTAH AEIMALRQGGLVMQNYRLYDATLYVTFEPCVMCAGAMIHSRIGRVVFGVRNAKTGAA
  MOD_RES (20)..(185): CONT. FROM ABOVE: GSLMDVLHHPGMNHRVEITEGILADECAALLCRFFRMPR RVFNAQKKAQSSTD" or "SEVEFSHEYWMRHALTLAKRARDEREVPVGAVLVLNN RVIGEGWNRAIGLHDPTAHAEIMALRQGGLVMQNYRLIDATLYSTFEPCVMCAGAMI HSRIGRVVFGVRNAKTGAAGSLMDVLHYPGMNHRVEITEGILADECAALLCYFFRMP
  MOD_RES (20)..(185): CONT. FROM ABOVE: RRVFNAQKKAQSSTD" or "SEVEFSHEYWMRHALTLA KRARDEREVPVGAVLVLNNRVIGEGWNRAIGLHDPTAHAEIMALRQGGLVMQNYRLY DATLYSTFEPCVMCAGAMIHSRIGRVVFGVRNAKTGAAGSLMDVLHHPGMNHRVEIT EGILADECAALLCRFFRMPRRVFNAQKKAQSSTD"
  See specification as filed for detailed description of substitutions and preferred embodiments
MKRTADGSEFESPKKKRKVXXXXXXXXXXXXXXXXXXXXXXXXXXXXXXXXXXXXXXXXXXXXXXXXXXXXXXXXXXXXXXXXXXXXXXXXXXXXXXXXXXXXXXXXXXXXXXXXXXXXXXXXXXXXXXXXXXXXXXXXXXXXXXXXXXXXXXXXXXXXXXXXXXXXXXXXXXXXXXXXXXXXXXSGGSSGGSSGSETPGTSESATPESSGGSSGGSDKKYSIGLAIGTNSVGWAVITDEYKVPSKKFKVLGNTDRHSIKKNLIGALLFDSGETAEATRLKRTARRRYTRRKNRICYLQEIFSNEMAKVDDSFFHRLEESFLVEEDKKHERHPIFGNIVDEVAYHEKYPTIYHLRKKLVDSTDKADLRLIYLALAHMIKFRGHFLIEGDLNPDNSDVDKLFIQLVQTYNQLFEENPINASGVDAKAILSARLSKSRRLENLIAQLPGEKKNGLFGNLIALSLGLTPNFKSNFDLAEDAKLQLSKDTYDDDLDNLLAQIGDQYADLFLAAKNLSDAILLSDILRVNTEITKAPLSASMIKRYDEHHQDLTLLKALVRQQLPEKYKEIFFDQSKNGYAGYIDGGASQEEFYKFIKPILEKMDGTEELLVKLNREDLLRKQRTFDNGSIPHQIHLGELHAILRRQEDFYPFLKDNREKIEKILTFRIPYYVGPLARGNSRFAWMTRKSEETITPWNFEEVVDKGASAQSFIERMTNFDKNLPNEKVLPKHSLLYEYFTVYNELTKVKYVTEGMRKPAFLSGEQKKAIVDLLFKTNRKVTVKQLKEDYFKKIECFDSVEISGVEDRFNASLGTYHDLLKIIKDKDFLDNEENEDILEDIVLTLTLFEDREMIEERLKTYAHLFDDKVMKQLKRRRYTGWGRLSRKLINGIRDKQSGKTILDFLKSDGFANRNFMQLIHDDSLTFKEDIQKAQVSGQGDSLHEHIANLAGSPAIKKGILQTVKVVDELVKVMGRHKPENIVIEMARENQTTQKGQKNSRERMKRIEEGIKELGSQILKEHPVENTQLQNEKLYLYYLQNGRDMYVDQELDINRLSDYDVDHIVPQSFLKDDSIDNKVLTRSDKNRGKSDNVPSEEVVKKMKNYWRQLLNAKLITQRKFDNLTKAERGGLSELDKAGFIKRQLVETRQITKHVAQILDSRMNTKYDENDKLIREVKVITLKSKLVSDFRKDFQFYKVREINNYHHAHDAYLNAVVGTALIKKYPKLESEFVYGDYKVYDVRKMIAKSEQEIGKATAKYFFYSNIMNFFKTEITLANGEIRKRPLIETNGETGEIVWDKGRDFATVRKVLSMPQVNIVKKTEVQTGGFSKESILPKRNSDKLIARKKDWDPKKYGGFDSPTVAYSVLVVAKVEKGKSKKLKSVKELLGITIMERSSFEKNPIDFLEAKGYKEVKKDLIIKLPKYSLFELENGRKRMLASAGELQKGNELALPSKYVNFLYLASHYEKLKGSPEDNEQKQLFVEQHKHYLDEIIEQISEFSKRVILADANLDKVLSAYNKHRDKPIREQAENIIHLFTLTNLGAPAAFKYFDTTIDRKRYTSTKEVLDATLIHQSITGLYETRIDLSQLGGDSGGSKRTADGSEFEPKKKRKV

SEQ ID NO: 411 - protein, 166 aa, Artificial Sequence
  Description of Artificial Sequence: Synthetic polypeptide
SEVEFSHEYWMRHALTLAKRARDEREVPVGAVLVLNNRVIGEGWNRAIGLHDPTAHAEIMALRQGGLVMQNYRLIDATLYVTFEPCVMCAGAMIHSRIGRVVFGVRNSKRGAAGSLMNVLNYPGMNHRVEITEGILADECAALLCDFYRMPRQVFNAQKKAQSSIN

SEQ ID NO: 412 - protein, 166 aa, Artificial Sequence
  Description of Artificial Sequence: Synthetic polypeptide
SEVEFSHEYWMRHALTLAKRARDEREVPVGAVLVLNNRVIGEGWNRAIGLHDPTAHAEIMALRQGGLVMQNYRLIDATLYGTFEPCVMCAGAMIHSRIGRVVFGVRNSKRGAAGSLMNVLNYPGMNHRVEITEGILADECAALLCDFYRMPRQVFNAQKKAQSSIN

SEQ ID NO: 413 - protein, 166 aa, Artificial Sequence
  Description of Artificial Sequence: Synthetic polypeptide
SEVEFSHEYWMRHALTLAAAARDEREVPVGAVLVLNNRVIGEGWNRAIGLHDPTAHAEIMALRQGGLVMQNYRLIDATLYVTFEPCVMCAGAMIHSRIGRVVFGVRNSKRGAAGSLMNVLNYPGMNHRVEITEGILADECAALLCDFYRMPRQVFNAQKKAQSSIN

SEQ ID NO: 414 - protein, 166 aa, Artificial Sequence
  Description of Artificial Sequence: Synthetic polypeptide
SEVEFSHEYWMRHALTLAKRARDEREVPVGAVLVLNNRVIGEGWNRAIGLHDPTAHAEIMALRQGGLVMQNYRLIDATLYVTFEPCVMCAGAMIHSRIGRVVFGVRNAKTGAAGSLMDVLHHPGMNHRVEITEGILADECAALLCRFFRMPRRVFNAQKKAQSSTD

SEQ ID NO: 415 - protein, 166 aa, Artificial Sequence
  Description of Artificial Sequence: Synthetic polypeptide
SEVEFSHEYWMRHALTLAKRARDEREVPVGAVLVLNNRVIGEGWNRAIGLHDPTAHAEIMALRQGGLVMQNYRLYDATLYVTFEPCVMCAGAMIHSRIGRVVFGVRNAKTGAAGSLMDVLHHPGMNHRVEITEGILADECAALLCRFFRMPRRVFNAQKKAQSSTD

SEQ ID NO: 416 - protein, 166 aa, Artificial Sequence
  Description of Artificial Sequence: Synthetic polypeptide
SEVEFSHEYWMRHALTLAKRARDEREVPVGAVLVLNNRVIGEGWNRAIGLHDPTAHAEIMALRQGGLVMQNYRLIDATLYSTFEPCVMCAGAMIHSRIGRVVFGVRNAKTGAAGSLMDVLHYPGMNHRVEITEGILADECAALLCYFFRMPRRVFNAQKKAQSSTD

SEQ ID NO: 417 - protein, 166 aa, Artificial Sequence
  Description of Artificial Sequence: Synthetic polypeptide
SEVEFSHEYWMRHALTLAKRARDEREVPVGAVLVLNNRVIGEGWNRAIGLHDPTAHAEIMALRQGGLVMQNYRLYDATLYSTFEPCVMCAGAMIHSRIGRVVFGVRNAKTGAAGSLMDVLHHPGMNHRVEITEGILADECAALLCRFFRMPRRVFNAQKKAQSSTD

SEQ ID NO: 418 - protein, 2301 aa, Artificial Sequence
  Description of Artificial Sequence: Synthetic polypeptide
MKRTADGSEFESPKKKRKVSEVEFSHEYWMRHALTLAKRARDEREVPVGAVLVLNNRVIGEGWNRAIGLHDPTAHAEIMALRQGGLVMQNYRLIDATLYGTFEPCVMCAGAMIHSRIGRVVFGVRNAKTGAAGSLMDVLHYPGMNHRVEITEGILADECAALLCYFFRMPRQVFNAQKKAQSSTDSGGSSGGSSGSETPGTSESATPESSGGSSGGSDKKYSIGLAIGTNSVGWAVITDEYKVPSKKFKVLGNTDRHSIKKNLIGALLFDSGETAEATRLKRTARRRYTRRKNRICYLQEIFSNEMAKVDDSFFHRLEESFLVEEDKKHERHPIFGNIVDEVAYHEKYPTIYHLRKKLVDSTDKADLRLIYLALAHMIKFRGHFLIEGDLNPDNSDVDKLFIQLVQTYNQLFEENPINASGVDAKAILSARLSKSRRLENLIAQLPGEKKNGLFGNLIALSLGLTPNFKSNFDLAEDAKLQLSKDTYDDDLDNLLAQIGDQYADLFLAAKNLSDAILLSDILRVNTEITKAPLSASMIKRYDEHHQDLTLLKALVRQQLPEKYKEIFFDQSKNGYAGYIDGGASQEEFYKFIKPILEKMDGTEELLVKLNREDLLRKQRTFDNGSIPHQIHLGELHAILRRQEDFYPFLKDNREKIEKILTFRIPYYVGPLARGNSRFAWMTRKSEETITPWNFEEVVDKGASAQSFIERMTNFDKNLPNEKVLPKHSLLYEYFTVYNELTKVKYVTEGMRKPAFLSGEQKKAIVDLLFKTNRKVTVKQLKEDYFKKIECFDSVEISGVEDRFNASLGTYHDLLKIIKDKDFLDNEENEDILEDIVLTLTLFEDREMIEERLKTYAHLFDDKVMKQLKRRRYTGWGRLSRKLINGIRDKQSGKTILDFLKSDGFANRNFMQLIHDDSLTFKEDIQKAQVSGQGDSLHEHIANLAGSPAIKKGILQTVKVVDELVKVMGRHKPENIVIEMARENQTTQKGQKNSRERMKRIEEGIKELGSQILKEHPVENTQLQNEKLYLYYLQNGRDMYVDQELDINRLSDYDVDHIVPQSFLKDDSIDNKVLTRSDKNRGKSDNVPSEEVVKKMKNYWRQLLNAKLITQRKFDNLTKAERGGLSELDKAGFIKRQLVETRQITKHVAQILDSRMNTKYDENDKLIREVKVITLKSKLVSDFRKDFQFYKVREINNYHHAHDAYLNAVVGTALIKKYPKLESEFVYGDYKVYDVRKMIAKSEQEIGKATAKYFFYSNIMNFFKTEITLANGEIRKRPLIETNGETGEIVWDKGRDFATVRKVLSMPQVNIVKKTEVQTGGFSKESILPKRNSDKLIARKKDWDPKKYGGFDSPTVAYSVLVVAKVEKGKSKKLKSVKELLGITIMERSSFEKNPIDFLEAKGYKEVKKDLIIKLPKYSLFELENGRKRMLASAGELQKGNELALPSKYVNFLYLASHYEKLKGSPEDNEQKQLFVEQHKHYLDEIIEQISEFSKRVILADANLDKVLSAYNKHRDKPIREQAENIIHLFTLTNLGAPAAFKYFDTTIDRKRYTSTKEVLDATLIHQSITGLYETRIDLSQLGGDSGGSKRTADGSEFEPKKKRKVSGGSSGGSSGSETPGTSESATPESSGGSSGGSTDAEYVRIHEKLDIYTFKKQFFNNKKSVSHRCYVLFELKRRGERRACFWGYAVNKPQSGTERGIHAEIFSIRKVEEYLRDNPGQFTINWYSSWSPCADCAEKILEWYNQELRGNGHTLKIWACKLYYEKNARNQIGLWNLRDNGVGLNVMVSEHYQCCRKIFIQSSHNQLNENRWLEKTLKRAEKWRSELSIMIQVKILHTTKSPAVSGGSGGSGGSTNLSDIIEKETGKQLVIQESILMLPEEVEEVIGNKPESDILVHTAYDESTDENVMLLTSDAPEYKPWALVIQDSNGENKIKMLSGGSGGSGGSTNLSDIIEKETGKQLVIQESILMLPEEVEEVIGNKPESDILVHTAYDESTDENVMLLTSDAPEYKPWALVIQDSNGENKIKMLGSGATNFSLLKQAGDVEENPGPMVSKGEELFTGVVPILVELDGDVNGHKFSVSGEGEGDATYGKLTLKFICTTGKLPVPWPTLVTTLTYGVQCFSRYPDHMKQHDFFKSAMPEGYVQERTIFFKDDGNYKTRAEVKFEGDTLVNRIELKGIDFKEDGNILGHKLEYNYNSHNVYIMADKQKNGIKVNFKIRHNIEDGSVQLADHYQQNTPIGDGPVLLPDNHYLSTQSALSKDPNEKRDHMVLLEFVTAAGITLGMDELYKSGGSPKKKRK

SEQ ID NO: 419 - protein, 2116 aa, Artificial Sequence
  Description of Artificial Sequence: Synthetic polypeptide
MKRTADGSEFESPKKKRKVSEVEFSHEYWMRHALTLAKRARDEREVPVGAVLVLNNRVIGEGWNRAIGLHDPTAHAEIMALRQGGLVMQNYRLIDATLYGTFEPCVMCAGAMIHSRIGRVVFGVRNAKTGAAGSLMDVLHYPGMNHRVEITEGILADECAALLCYFFRMPRQVFNAQKKAQSSTDSGGSSGGSSGSETPGTSESATPESSGGSSGGSDKKYSIGLAIGTNSVGWAVITDEYKVPSKKFKVLGNTDRHSIKKNLIGALLFDSGETAEATRLKRTARRRYTRRKNRICYLQEIFSNEMAKVDDSFFHRLEESFLVEEDKKHERHPIFGNIVDEVAYHEKYPTIYHLRKKLVDSTDKADLRLIYLALAHMIKFRGHFLIEGDLNPDNSDVDKLFIQLVQTYNQLFEENPINASGVDAKAILSARLSKSRRLENLIAQLPGEKKNGLFGNLIALSLGLTPNFKSNFDLAEDAKLQLSKDTYDDDLDNLLAQIGDQYADLFLAAKNLSDAILLSDILRVNTEITKAPLSASMIKRYDEHHQDLTLLKALVRQQLPEKYKEIFFDQSKNGYAGYIDGGASQEEFYKFIKPILEKMDGTEELLVKLNREDLLRKQRTFDNGSIPHQIHLGELHAILRRQEDFYPFLKDNREKIEKILTFRIPYYVGPLARGNSRFAWMTRKSEETITPWNFEEVVDKGASAQSFIERMTNFDKNLPNEKVLPKHSLLYEYFTVYNELTKVKYVTEGMRKPAFLSGEQKKAIVDLLFKTNRKVTVKQLKEDYFKKIECFDSVEISGVEDRFNASLGTYHDLLKIIKDKDFLDNEENEDILEDIVLTLTLFEDREMIEERLKTYAHLFDDKVMKQLKRRRYTGWGRLSRKLINGIRDKQSGKTILDFLKSDGFANRNFMQLIHDDSLTFKEDIQKAQVSGQGDSLHEHIANLAGSPAIKKGILQTVKVVDELVKVMGRHKPENIVIEMARENQTTQKGQKNSRERMKRIEEGIKELGSQILKEHPVENTQLQNEKLYLYYLQNGRDMYVDQELDINRLSDYDVDHIVPQSFLKDDSIDNKVLTRSDKNRGKSDNVPSEEVVKKMKNYWRQLLNAKLITQRKFDNLTKAERGGLSELDKAGFIKRQLVETRQITKHVAQILDSRMNTKYDENDKLIREVKVITLKSKLVSDFRKDFQFYKVREINNYHHAHDAYLNAVVGTALIKKYPKLESEFVYGDYKVYDVRKMIAKSEQEIGKATAKYFFYSNIMNFFKTEITLANGEIRKRPLIETNGETGEIVWDKGRDFATVRKVLSMPQVNIVKKTEVQTGGFSKESILPKRNSDKLIARKKDWDPKKYGGFDSPTVAYSVLVVAKVEKGKSKKLKSVKELLGITIMERSSFEKNPIDFLEAKGYKEVKKDLIIKLPKYSLFELENGRKRMLASAGELQKGNELALPSKYVNFLYLASHYEKLKGSPEDNEQKQLFVEQHKHYLDEIIEQISEFSKRVILADANLDKVLSAYNKHRDKPIREQAENIIHLFTLTNLGAPAAFKYFDTTIDRKRYTSTKEVLDATLIHQSITGLYETRIDLSQLGGDSGGSKRTADGSEFEPKKKRKVSGGSSGGSSGSETPGTSESATPESSGGSSGGSTDAEYVRIHEKLDIYTFKKQFFNNKKSVSHRCYVLFELKRRGERRACFWGYAVNKPQSGTERGIHAEIFSIRKVEEYLRDNPGQFTINWYSSWSPCADCAEKILEWYNQELRGNGHTLKIWACKLYYEKNARNQIGLWNLRDNGVGLNVMVSEHYQCCRKIFIQSSHNQLNENRWLEKTLKRAEKWRSELSIMIQVKILHTTKSPAVGSGATNFSLLKQAGDVEENPGPMVSKGEELFTGVVPILVELDGDVNGHKFSVSGEGEGDATYGKLTLKFICTTGKLPVPWPTLVTTLTYGVQCFSRYPDHMKQHDFFKSAMPEGYVQERTIFFKDDGNYKTRAEVKFEGDTLVNRIELKGIDFKEDGNILGHKLEYNYNSHNVYIMADKQKNGIKVNFKIRHNIEDGSVQLADHYQQNTPIGDGPVLLPDNHYLSTQSALSKDPNEKRDHMVLLEFVTAAGITLGMDELYKSGGSPKKKRKV

SEQ ID NO: 420 - protein, 2302 aa, Artificial Sequence
  Description of Artificial Sequence: Synthetic polypeptide
MKRTADGSEFESPKKKRKVSEVEFSHEYWMRHALTLAKRARDEREVPVGAVLVLNNRVIGEGWNRAIGLHDPTAHAEIMALRQGGLVMQNYRLIDATLYGTFEPCVMCAGAMIHSRIGRVVFGVRNAKTGAAGSLMDVLHYPGMNHRVEITEGILADECAALLCYFFRMPRQVFNAQKKAQSSTDSGGSSGGSSGSETPGTSESATPESSGGSSGGSDKKYSIGLAIGTNSVGWAVITDEYKVPSKKFKVLGNTDRHSIKKNLIGALLFDSGETAEATRLKRTARRRYTRRKNRICYLQEIFSNEMAKVDDSFFHRLEESFLVEEDKKHERHPIFGNIVDEVAYHEKYPTIYHLRKKLVDSTDKADLRLIYLALAHMIKFRGHFLIEGDLNPDNSDVDKLFIQLVQTYNQLFEENPINASGVDAKAILSARLSKSRRLENLIAQLPGEKKNGLFGNLIALSLGLTPNFKSNFDLAEDAKLQLSKDTYDDDLDNLLAQIGDQYADLFLAAKNLSDAILLSDILRVNTEITKAPLSASMIKRYDEHHQDLTLLKALVRQQLPEKYKEIFFDQSKNGYAGYIDGGASQEEFYKFIKPILEKMDGTEELLVKLNREDLLRKQRTFDNGSIPHQIHLGELHAILRRQEDFYPFLKDNREKIEKILTFRIPYYVGPLARGNSRFAWMTRKSEETITPWNFEEVVDKGASAQSFIERMTNFDKNLPNEKVLPKHSLLYEYFTVYNELTKVKYVTEGMRKPAFLSGEQKKAIVDLLFKTNRKVTVKQLKEDYFKKIECFDSVEISGVEDRFNASLGTYHDLLKIIKDKDFLDNEENEDILEDIVLTLTLFEDREMIEERLKTYAHLFDDKVMKQLKRRRYTGWGRLSRKLINGIRDKQSGKTILDFLKSDGFANRNFMQLIHDDSLTFKEDIQKAQVSGQGDSLHEHIANLAGSPAIKKGILQTVKVVDELVKVMGRHKPENIVIEMARENQTTQKGQKNSRERMKRIEEGIKELGSQILKEHPVENTQLQNEKLYLYYLQNGRDMYVDQELDINRLSDYDVDHIVPQSFLKDDSIDNKVLTRSDKNRGKSDNVPSEEVVKKMKNYWRQLLNAKLITQRKFDNLTKAERGGLSELDKAGFIKRQLVETRQITKHVAQILDSRMNTKYDENDKLIREVKVITLKSKLVSDFRKDFQFYKVREINNYHHAHDAYLNAVVGTALIKKYPKLESEFVYGDYKVYDVRKMIAKSEQEIGKATAKYFFYSNIMNFFKTEITLANGEIRKRPLIETNGETGEIVWDKGRDFATVRKVLSMPQVNIVKKTEVQTGGFSKESIRPKRNSDKLIARKKDWDPKKYGGFVSPTVAYSVLVVAKVEKGKSKKLKSVKELLGITIMERSSFEKNPIDFLEAKGYKEVKKDLIIKLPKYSLFELENGRKRMLASARFLQKGNELALPSKYVNFLYLASHYEKLKGSPEDNEQKQLFVEQHKHYLDEIIEQISEFSKRVILADANLDKVLSAYNKHRDKPIREQAENIIHLFTLTNLGAPRAFKYFDTTIDRKVYRSTKEVLDATLIHQSITGLYETRIDLSQLGGDSGGSKRTADGSEFEPKKKRKVSGGSSGGSSGSETPGTSESATPESSGGSSGGSTDAEYVRIHEKLDIYTFKKQFFNNKKSVSHRCYVLFELKRRGERRACFWGYAVNKPQSGTERGIHAEIFSIRKVEEYLRDNPGQFTINWYSSWSPCADCAEKILEWYNQELRGNGHTLKIWACKLYYEKNARNQIGLWNLRDNGVGLNVMVSEHYQCCRKIFIQSSHNQLNENRWLEKTLKRAEKWRSELSIMIQVKILHTTKSPAVSGGSGGSGGSTNLSDIIEKETGKQLVIQESILMLPEEVEEVIGNKPESDILVHTAYDESTDENVMLLTSDAPEYKPWALVIQDSNGENKIKMLSGGSGGSGGSTNLSDIIEKETGKQLVIQESILMLPEEVEEVIGNKPESDILVHTAYDESTDENVMLLTSDAPEYKPWALVIQDSNGENKIKMLGSGATNFSLLKQAGDVEENPGPMVSKGEELFTGVVPILVELDGDVNGHKFSVSGEGEGDATYGKLTLKFICTTGKLPVPWPTLVTTLTYGVQCFSRYPDHMKQHDFFKSAMPEGYVQERTIFFKDDGNYKTRAEVKFEGDTLVNRIELKGIDFKEDGNILGHKLEYNYNSHNVYIMADKQKNGIKVNFKIRHNIEDGSVQLADHYQQNTPIGDGPVLLPDNHYLSTQSALSKDPNEKRDHMVLLEFVTAAGITLGMDELYKSGGSPKKKRKV

SEQ ID NO: 421 - protein, 2302 aa, Artificial Sequence
  Description of Artificial Sequence: Synthetic polypeptide
MKRTADGSEFESPKKKRKVSEVEFSHEYWMRHALTLAKRARDEREVPVGAVLVLNNRVIGEGWNRAIGLHDPTAHAEIMALRQGGLVMQNYRLIDATLYGTFEPCVMCAGAMIHSRIGRVVFGVRNAKTGAAGSLMDVLHYPGMNHRVEITEGILADECAALLCYFFRMPRQVFNAQKKAQSSTDSGGSSGGSSGSETPGTSESATPESSGGSSGGSDKKYSIGLAIGTNSVGWAVITDEYKVPSKKFKVLGNTDRHSIKKNLIGALLFDSGETAEATRLKRTARRRYTRRKNRICYLQEIFSNEMAKVDDSFFHRLEESFLVEEDKKHERHPIFGNIVDEVAYHEKYPTIYHLRKKLVDSTDKADLRLIYLALAHMIKFRGHFLIEGDLNPDNSDVDKLFIQLVQTYNQLFEENPINASGVDAKAILSARLSKSRRLENLIAQLPGEKKNGLFGNLIALSLGLTPNFKSNFDLAEDAKLQLSKDTYDDDLDNLLAQIGDQYADLFLAAKNLSDAILLSDILRVNTEITKAPLSASMIKRYDEHHQDLTLLKALVRQQLPEKYKEIFFDQSKNGYAGYIDGGASQEEFYKFIKPILEKMDGTEELLVKLNREDLLRKQRTFDNGSIPHQIHLGELHAILRRQEDFYPFLKDNREKIEKILTFRIPYYVGPLARGNSRFAWMTRKSEETITPWNFEEVVDKGASAQSFIERMTNFDKNLPNEKVLPKHSLLYEYFTVYNELTKVKYVTEGMRKPAFLSGEQKKAIVDLLFKTNRKVTVKQLKEDYFKKIECFDSVEISGVEDRFNASLGTYHDLLKIIKDKDFLDNEENEDILEDIVLTLTLFEDREMIEERLKTYAHLFDDKVMKQLKRRRYTGWGRLSRKLINGIRDKQSGKTILDFLKSDGFANRNFMQLIHDDSLTFKEDIQKAQVSGQGDSLHEHIANLAGSPAIKKGILQTVKVVDELVKVMGRHKPENIVIEMARENQTTQKGQKNSRERMKRIEEGIKELGSQILKEHPVENTQLQNEKLYLYYLQNGRDMYVDQELDINRLSDYDVDHIVPQSFLKDDSIDNKVLTRSDKNRGKSDNVPSEEVVKKMKNYWRQLLNAKLITQRKFDNLTKAERGGLSELDKAGFIKRQLVETRQITKHVAQILDSRMNTKYDENDKLIREVKVITLKSKLVSDFRKDFQFYKVREINNYHHAHDAYLNAVVGTALIKKYPKLESEFVYGDYKVYDVRKMIAKSEQEIGKATAKYFFYSNIMNFFKTEITLANGEIRKRPLIETNGETGEIVWDKGRDFATVRKVLSMPQVNIVKKTEVQTGGFSKESILPKRNSDKLIARKKDWDPKKYGGFVSPTVAYSVLVVAKVEKGKSKKLKSVKELLGITIMERSSFEKNPIDFLEAKGYKEVKKDLIIKLPKYSLFELENGRKRMLASARELQKGNELALPSKYVNFLYLASHYEKLKGSPEDNEQKQLFVEQHKHYLDEIIEQISEFSKRVILADANLDKVLSAYNKHRDKPIREQAENIIHLFTLTNLGAPAAFKYFDTTIDRKQYRSTKEVLDATLIHQSITGLYETRIDLSQLGGDSGGSKRTADGSEFEPKKKRKVSGGSSGGSSGSETPGTSESATPESSGGSSGGSTDAEYVRIHEKLDIYTFKKQFFNNKKSVSHRCYVLFELKRRGERRACFWGYAVNKPQSGTERGIHAEIFSIRKVEEYLRDNPGQFTINWYSSWSPCADCAEKILEWYNQELRGNGHTLKIWACKLYYEKNARNQIGLWNLRDNGVGLNVMVSEHYQCCRKIFIQSSHNQLNENRWLEKTLKRAEKWRSELSIMIQVKILHTTKSPAVSGGSGGSGGSTNLSDIIEKETGKQLVIQESILMLPEEVEEVIGNKPESDILVHTAYDESTDENVMLLTSDAPEYKPWALVIQDSNGENKIKMLSGGSGGSGGSTNLSDIIEKETGKQLVIQESILMLPEEVEEVIGNKPESDILVHTAYDESTDENVMLLTSDAPEYKPWALVIQDSNGENKIKMLGSGATNFSLLKQAGDVEENPGPMVSKGEELFTGVVPILVELDGDVNGHKFSVSGEGEGDATYGKLTLKFICTTGKLPVPWPTLVTTLTYGVQCFSRYPDHMKQHDFFKSAMPEGYVQERTIFFKDDGNYKTRAEVKFEGDTLVNRIELKGIDFKEDGNILGHKLEYNYNSHNVYIMADKQKNGIKVNFKIRHNIEDGSVQLADHYQQNTPIGDGPVLLPDNHYLSTQSALSKDPNEKRDHMVLLEFVTAAGITLGMDELYKSGGSPKKKRKV

SEQ ID NO: 422 - protein, 2294 aa, Artificial Sequence
  Description of Artificial Sequence: Synthetic polypeptide
MKRTADGSEFESPKKKRKVSEVEFSHEYWMRHALTLAKRARDEREVPVGAVLVLNNRVIGEGWNRAIGLHDPTAHAEIMALRQGGLVMQNYRLIDATLYGTFEPCVMCAGAMIHSRIGRVVFGVRNAKTGAAGSLMDVLHYPGMNHRVEITEGILADECAALLCYFFRMPRQVFNAQKKAQSSTDSGGSSGGSSGSETPGTSESATPESSGGSSGGSDKKYSIGLAIGTNSVGWAVITDEYKVPSKKFKVLGNTDRHSIKKNLIGALLFDSGETAEATRLKRTARRRYTRRKNRICYLQEIFSNEMAKVDDSFFHRLEESFLVEEDKKHERHPIFGNIVDEVAYHEKYPTIYHLRKKLVDSTDKADLRLIYLALAHMIKFRGHFLIEGDLNPDNSDVDKLFIQLVQTYNQLFEENPINASGVDAKAILSARLSKSRRLENLIAQLPGEKKNGLFGNLIALSLGLTPNFKSNFDLAEDAKLQLSKDTYDDDLDNLLAQIGDQYADLFLAAKNLSDAILLSDILRVNTEITKAPLSASMIKRYDEHHQDLTLLKALVRQQLPEKYKEIFFDQSKNGYAGYIDGGASQEEFYKFIKPILEKMDGTEELLVKLNREDLLRKQRTFDNGSIPHQIHLGELHAILRRQEDFYPFLKDNREKIEKILTFRIPYYVGPLARGNSRFAWMTRKSEETITPWNFEEVVDKGASAQSFIERMTNFDKNLPNEKVLPKHSLLYEYFTVYNELTKVKYVTEGMRKPAFLSGEQKKAIVDLLFKTNRKVTVKQLKEDYFKKIECFDSVEISGVEDRFNASLGTYHDLLKIIKDKDFLDNEENEDILEDIVLTLTLFEDREMIEERLKTYAHLFDDKVMKQLKRRRYTGWGRLSRKLINGIRDKQSGKTILDFLKSDGFANRNFMQLIHDDSLTFKEDIQKAQVSGQGDSLHEHIANLAGSPAIKKGILQTVKVVDELVKVMGRHKPENIVIEMARENQTTQKGQKNSRERMKRIEEGIKELGSQILKEHPVENTQLQNEKLYLYYLQNGRDMYVDQELDINRLSDYDVDHIVPQSFLKDDSIDNKVLTRSDKNRGKSDNVPSEEVVKKMKNYWRQLLNAKLITQRKFDNLTKAERGGLSELDKAGFIKRQLVETRQITKHVAQILDSRMNTKYDENDKLIREVKVITLKSKLVSDFRKDFQFYKVREINNYHHAHDAYLNAVVGTALIKKYPKLESEFVYGDYKVYDVRKMIAKSEQEIGKATAKYFFYSNIMNFFKTEITLANGEIRKRPLIETNGETGEIVWDKGRDFATVRKVLSMPQVNIVKKTEIQTVGQNGGLFDDNPKSPLEVTPSKLVPLKKELNPKKYGGYQKPTTAYPVLLITDTKQLIPISVMNKKQFEQNPVKFLRDRGYQQVGKNDFIKLPKYTLVDIGDGIKRLWASSKEIHKGNQLVVSKKSQILLYHAHHLDSDLSNDYLQNHNQQFDVLFNEIISFSKKCKLGKEHIQKIENVYSNKKNSASIEELAESFIKLLGFTQLGATSPFNFLGVKLNQKQYKGKKDYILPCTEGTLIRQSITGLYETRVDLSKIGEDSGGSKRTADGSEFEPKKKRKVSGGSSGGSSGSETPGTSESATPESSGGSSGGSTDAEYVRIHEKLDIYTFKKQFFNNKKSVSHRCYVLFELKRRGERRACFWGYAVNKPQSGTERGIHAEIFSIRKVEEYLRDNPGQFTINWYSSWSPCADCAEKILEWYNQELRGNGHTLKIWACKLYYEKNARNQIGLWNLRDNGVGLNVMVSEHYQCCRKIFIQSSHNQLNENRWLEKTLKRAEKWRSELSIMIQVKILHTTKSPAVSGGSGGSGGSTNLSDIIEKETGKQLVIQESILMLPEEVEEVIGNKPESDILVHTAYDESTDENVMLLTSDAPEYKPWALVIQDSNGENKIKMLSGGSGGSGGSTNLSDIIEKETGKQLVIQESILMLPEEVEEVIGNKPESDILVHTAYDESTDENVMLLTSDAPEYKPWALVIQDSNGENKIKMLGSGATNFSLLKQAGDVEENPGPMVSKGEELFTGVVPILVELDGDVNGHKFSVSGEGEGDATYGKLTLKFICTTGKLPVPWPTLVTTLTYGVQCFSRYPDHMKQHDFFKSAMPEGYVQERTIFFKDDGNYKTRAEVKFEGDTLVNRIELKGIDFKEDGNILGHKLEYNYNSHNVYIMADKQKNGIKVNFKIRHNIEDGSVQLADHYQQNTPIGDGPVLLPDNHYLSTQSALSKDPNEKRDHMVLLEFVTAAGITLGMDELYKSGGSPKKKRKV

SEQ ID NO: 423 - protein, 2169 aa, Artificial Sequence
  Description of Artificial Sequence: Synthetic polypeptide
MKRTADGSEFESPKKKRKVSSETGPVAVDPTLRRRIEPHEFEVFFDPRELAKETCLLYEINWGGRHSIWRHTSQNTNKHVEVNFIEKFTTERYFCPNTRCSITWFLSWSPCGECSRAITEFLSRYPHVTLFIYIARLYHHADPRNRQGLRDLISSGVTIQIMTEQESGYCWRNFVNYSPSNEAHWPRYPHLWVRLYVLELYCIILGLPPCLNILRRKQPQLTFFTIALQSCHYQRLPPHILWATGLKSGGSSGGSSGSETPGTSESATPESSGGSSGGSDKKYSIGLAIGTNSVGWAVITDEYKVPSKKFKVLGNTDRHSIKKNLIGALLFDSGETAEATRLKRTARRRYTRRKNRICYLQEIFSNEMAKVDDSFFHRLEESFLVEEDKKHERHPIFGNIVDEVAYHEKYPTIYHLRKKLVDSTDKADLRLIYLALAHMIKFRGHFLIEGDLNPDNSDVDKLFIQLVQTYNQLFEENPINASGVDAKAILSARLSKSRRLENLIAQLPGEKKNGLFGNLIALSLGLTPNFKSNFDLAEDAKLQLSKDTYDDDLDNLLAQIGDQYADLFLAAKNLSDAILLSDILRVNTEITKAPLSASMIKRYDEHHQDLTLLKALVRQQLPEKYKEIFFDQSKNGYAGYIDGGASQEEFYKFIKPILEKMDGTEELLVKLNREDLLRKQRTFDNGSIPHQIHLGELHAILRRQEDFYPFLKDNREKIEKILTFRIPYYVGPLARGNSRFAWMTRKSEETITPWNFEEVVDKGASAQSFIERMTNFDKNLPNEKVLPKHSLLYEYFTVYNELTKVKYVTEGMRKPAFLSGEQKKAIVDLLFKTNRKVTVKQLKEDYFKKIECFDSVEISGVEDRFNASLGTYHDLLKIIKDKDFLDNEENEDILEDIVLTLTLFEDREMIEERLKTYAHLFDDKVMKQLKRRRYTGWGRLSRKLINGIRDKQSGKTILDFLKSDGFANRNFMQLIHDDSLTFKEDIQKAQVSGQGDSLHEHIANLAGSPAIKKGILQTVKVVDELVKVMGRHKPENIVIEMARENQTTQKGQKNSRERMKRIEEGIKELGSQILKEHPVENTQLQNEKLYLYYLQNGRDMYVDQELDINRLSDYDVDHIVPQSFLKDDSIDNKVLTRSDKNRGKSDNVPSEEVVKKMKNYWRQLLNAKLITQRKFDNLTKAERGGLSELDKAGFIKRQLVETRQITKHVAQILDSRMNTKYDENDKLIREVKVITLKSKLVSDFRKDFQFYKVREINNYHHAHDAYLNAVVGTALIKKYPKLESEFVYGDYKVYDVRKMIAKSEQEIGKATAKYFFYSNIMNFFKTEITLANGEIRKRPLIETNGETGEIVWDKGRDFATVRKVLSMPQVNIVKKTEVQTGGFSKESILPKRNSDKLIARKKDWDPKKYGGFDSPTVAYSVLVVAKVEKGKSKKLKSVKELLGITIMERSSFEKNPIDFLEAKGYKEVKKDLIIKLPKYSLFELENGRKRMLASAGELQKGNELALPSKYVNFLYLASHYEKLKGSPEDNEQKQLFVEQHKHYLDEIIEQISEFSKRVILADANLDKVLSAYNKHRDKPIREQAENIIHLFTLTNLGAPAAFKYFDTTIDRKRYTSTKEVLDATLIHQSITGLYETRIDLSQLGGDSGGSGGSGGSANELTWHDVLAEEKQQPYFLNTLQTVASERQSGVTIYPPQKDVFNAFRFTELGDVKVVILGQDPYHGPGQAHGLAFSVRPGIAIPPSLLNMYKELENTIPGFTRPNHGYLESWARQGVLLLNTVLTVRAGQAHSHASLGWETFTDKVISLINQHREGVVFLLWGSHAQKKGAIIDKQRHHVLKAPHPSPLSAHRGFFGCNHFVLANQWLEQRGETPIDWMPVLPAESESGGSKRTADGSEFEPKKKRKVGGGGSGATNFSLLKQAGDVEENPGPMVSKGEELFTGVVPILVELDGDVNGHKFSVSGEGEGDATYGKLTLKFICTTGKLPVPWPTLVTTLTYGVQCFSRYPDHMKQHDFFKSAMPEGYVQERTIFFKDDGNYKTRAEVKFEGDTLVNRIELKGIDFKEDGNILGHKLEYNYNSHNVYIMADKQKNGIKVNFKIRHNIEDGSVQLADHYQQNTPIGDGPVLLPDNHYLSTQSALSKDPNEKRDHMVLLEFVTAAGITLGMDELYK

SEQ ID NO: 424 - protein, 2169 aa, Artificial Sequence
  Description of Artificial Sequence: Synthetic polypeptide
MKRTADGSEFESPKKKRKVANELTWHDVLAEEKQQPYFLNTLQTVASERQSGVTIYPPQKDVFNAFRFTELGDVKVVILGQDPYHGPGQAHGLAFSVRPGIAIPPSLLNMYKELENTIPGFTRPNHGYLESWARQGVLLLNTVLTVRAGQAHSHASLGWETFTDKVISLINQHREGVVFLLWGSHAQKKGAIIDKQRHHVLKAPHPSPLSAHRGFFGCNHFVLANQWLEQRGETPIDWMPVLPAESESGGSGGSGGSSSETGPVAVDPTLRRRIEPHEFEVFFDPRELAKETCLLYEINWGGRHSIWRHTSQNTNKHVEVNFIEKFTTERYFCPNTRCSITWFLSWSPCGECSRAITEFLSRYPHVTLFIYIARLYHHADPRNRQGLRDLISSGVTIQIMTEQESGYCWRNFVNYSPSNEAHWPRYPHLWVRLYVLELYCIILGLPPCLNILRRKQPQLTFFTIALQSCHYQRLPPHILWATGLKSGGSSGGSSGSETPGTSESATPESSGGSSGGSDKKYSIGLAIGTNSVGWAVITDEYKVPSKKFKVLGNTDRHSIKKNLIGALLFDSGETAEATRLKRTARRRYTRRKNRICYLQEIFSNEMAKVDDSFFHRLEESFLVEEDKKHERHPIFGNIVDEVAYHEKYPTIYHLRKKLVDSTDKADLRLIYLALAHMIKFRGHFLIEGDLNPDNSDVDKLFIQLVQTYNQLFEENPINASGVDAKAILSARLSKSRRLENLIAQLPGEKKNGLFGNLIALSLGLTPNFKSNFDLAEDAKLQLSKDTYDDDLDNLLAQIGDQYADLFLAAKNLSDAILLSDILRVNTEITKAPLSASMIKRYDEHHQDLTLLKALVRQQLPEKYKEIFFDQSKNGYAGYIDGGASQEEFYKFIKPILEKMDGTEELLVKLNREDLLRKQRTFDNGSIPHQIHLGELHAILRRQEDFYPFLKDNREKIEKILTFRIPYYVGPLARGNSRFAWMTRKSEETITPWNFEEVVDKGASAQSFIERMTNFDKNLPNEKVLPKHSLLYEYFTVYNELTKVKYVTEGMRKPAFLSGEQKKAIVDLLFKTNRKVTVKQLKEDYFKKIECFDSVEISGVEDRFNASLGTYHDLLKIIKDKDFLDNEENEDILEDIVLTLTLFEDREMIEERLKTYAHLFDDKVMKQLKRRRYTGWGRLSRKLINGIRDKQSGKTILDFLKSDGFANRNFMQLIHDDSLTFKEDIQKAQVSGQGDSLHEHIANLAGSPAIKKGILQTVKVVDELVKVMGRHKPENIVIEMARENQTTQKGQKNSRERMKRIEEGIKELGSQILKEHPVENTQLQNEKLYLYYLQNGRDMYVDQELDINRLSDYDVDHIVPQSFLKDDSIDNKVLTRSDKNRGKSDNVPSEEVVKKMKNYWRQLLNAKLITQRKFDNLTKAERGGLSELDKAGFIKRQLVETRQITKHVAQILDSRMNTKYDENDKLIREVKVITLKSKLVSDFRKDFQFYKVREINNYHHAHDAYLNAVVGTALIKKYPKLESEFVYGDYKVYDVRKMIAKSEQEIGKATAKYFFYSNIMNFFKTEITLANGEIRKRPLIETNGETGEIVWDKGRDFATVRKVLSMPQVNIVKKTEVQTGGFSKESILPKRNSDKLIARKKDWDPKKYGGFDSPTVAYSVLVVAKVEKGKSKKLKSVKELLGITIMERSSFEKNPIDFLEAKGYKEVKKDLIIKLPKYSLFELENGRKRMLASAGELQKGNELALPSKYVNFLYLASHYEKLKGSPEDNEQKQLFVEQHKHYLDEIIEQISEFSKRVILADANLDKVLSAYNKHRDKPIREQAENIIHLFTLTNLGAPAAFKYFDTTIDRKRYTSTKEVLDATLIHQSITGLYETRIDLSQLGGDSGGSKRTADGSEFEPKKKRKVGGGGSGATNFSLLKQAGDVEENPGPMVSKGEELFTGVVPILVELDGDVNGHKFSVSGEGEGDATYGKLTLKFICTTGKLPVPWPTLVTTLTYGVQCFSRYPDHMKQHDFFKSAMPEGYVQERTIFFKDDGNYKTRAEVKFEGDTLVNRIELKGIDFKEDGNILGHKLEYNYNSHNVYIMADKQKNGIKVNFKIRHNIEDGSVQLADHYQQNTPIGDGPVLLPDNHYLSTQSALSKDPNEKRDHMVLLEFVTAAGITLGMDELYK

SEQ ID NO: 425 - protein, 1931 aa, Artificial Sequence
  Description of Artificial Sequence: Synthetic polypeptide
MKRTADGSEFESPKKKRKVSSETGPVAVDPTLRRRIEPHEFEVFFDPRELRKETCLLYEINWGGRHSIWRHTSQNTNKHVEVNFIEKFTTERYFCPNTRCSITWFLSWSPCGECSRAITEFLSRYPHVTLFIYIARLYHHADPRNRQGLRDLISSGVTIQIMTEQESGYCWRNFVNYSPSNEAHWPRYPHLWVRLYVLELYCIILGLPPCLNILRRKQPQLTFFTIALQSCHYQRLPPHILWATGLKSGGSSGGSSGSETPGTSESATPESSGGSSGGSDKKYSIGLAIGTNSVGWAVITDEYKVPSKKFKVLGNTDRHSIKKNLIGALLFDSGETAEATRLKRTARRRYTRRKNRICYLQEIFSNEMAKVDDSFFHRLEESFLVEEDKKHERHPIFGNIVDEVAYHEKYPTIYHLRKKLVDSTDKADLRLIYLALAHMIKFRGHFLIEGDLNPDNSDVDKLFIQLVQTYNQLFEENPINASGVDAKAILSARLSKSRRLENLIAQLPGEKKNGLFGNLIALSLGLTPNFKSNFDLAEDAKLQLSKDTYDDDLDNLLAQIGDQYADLFLAAKNLSDAILLSDILRVNTEITKAPLSASMIKRYDEHHQDLTLLKALVRQQLPEKYKEIFFDQSKNGYAGYIDGGASQEEFYKFIKPILEKMDGTEELLVKLNREDLLRKQRTFDNGSIPHQIHLGELHAILRRQEDFYPFLKDNREKIEKILTFRIPYYVGPLARGNSRFAWMTRKSEETITPWNFEEVVDKGASAQSFIERMTNFDKNLPNEKVLPKHSLLYEYFTVYNELTKVKYVTEGMRKPAFLSGEQKKAIVDLLFKTNRKVTVKQLKEDYFKKIECFDSVEISGVEDRFNASLGTYHDLLKIIKDKDFLDNEENEDILEDIVLTLTLFEDREMIEERLKTYAHLFDDKVMKQLKRRRYTGWGRLSRKLINGIRDKQSGKTILDFLKSDGFANRNFMQLIHDDSLTFKEDIQKAQVSGQGDSLHEHIANLAGSPAIKKGILQTVKVVDELVKVMGRHKPENIVIEMARENQTTQKGQKNSRERMKRIEEGIKELGSQILKEHPVENTQLQNEKLYLYYLQNGRDMYVDQELDINRLSDYDVDHIVPQSFLKDDSIDNKVLTRSDKNRGKSDNVPSEEVVKKMKNYWRQLLNAKLITQRKFDNLTKAERGGLSELDKAGFIKRQLVETRQITKHVAQILDSRMNTKYDENDKLIREVKVITLKSKLVSDFRKDFQFYKVREINNYHHAHDAYLNAVVGTALIKKYPKLESEFVYGDYKVYDVRKMIAKSEQEIGKATAKYFFYSNIMNFFKTEITLANGEIRKRPLIETNGETGEIVWDKGRDFATVRKVLSMPQVNIVKKTEVQTGGFSKESILPKRNSDKLIARKKDWDPKKYGGFDSPTVAYSVLVVAKVEKGKSKKLKSVKELLGITIMERSSFEKNPIDFLEAKGYKEVKKDLIIKLPKYSLFELENGRKRMLASAGELQKGNELALPSKYVNFLYLASHYEKLKGSPEDNEQKQLFVEQHKHYLDEIIEQISEFSKRVILADANLDKVLSAYNKHRDKPIREQAENIIHLFTLTNLGAPAAFKYFDTTIDRKRYTSTKEVLDATLIHQSITGLYETRIDLSQLGGDSGGSKRTADGSEFEPKKKRKVGGGGSGATNFSLLKQAGDVEENPGPMVSKGEELFTGVVPILVELDGDVNGHKFSVSGEGEGDATYGKLTLKFICTTGKLPVPWPTLVTTLTYGVQCFSRYPDHMKQHDFFKSAMPEGYVQERTIFFKDDGNYKTRAEVKFEGDTLVNRIELKGIDFKEDGNILGHKLEYNYNSHNVYIMADKQKNGIKVNFKIRHNIEDGSVQLADHYQQNTPIGDGPVLLPDNHYLSTQSALSKDPNEKRDHMVLLEFVTAAGITLGMDELYK

SEQ ID NO: 426 - protein, 2089 aa, Artificial Sequence
  Description of Artificial Sequence: Synthetic polypeptide
MEASPASGPRHLMDPHIFTSNFNNGIGRHKTYLCYEVERLDNGTSVKMDQHRGFLHGQAKNLLCGFYGRHAELRFLDLVPSLQLDPAQIYRVTWFISWSPCFSWGCAGEVRAFLQENTHVRLRIFAARIYDYDPLYKEALQMLRDAGAQVSIMTYDEFKHCWDTFVDHQGCPFQPWDGLDEHSQALSGRLRAILQNQGNSGSETPGTSESATPESDKKYSIGLAIGTNSVGWAVITDEYKVPSKKFKVLGNTDRHSIKKNLIGALLFDSGETAEATRLKRTARRRYTRRKNRICYLQEIFSNEMAKVDDSFFHRLEESFLVEEDKKHERHPIFGNIVDEVAYHEKYPTIYHLRKKLVDSTDKADLRLIYLALAHMIKFRGHFLIEGDLNPDNSDVDKLFIQLVQTYNQLFEENPINASGVDAKAILSARLSKSRRLENLIAQLPGEKKNGLFGNLIALSLGLTPNFKSNFDLAEDAKLQLSKDTYDDDLDNLLAQIGDQYADLFLAAKNLSDAILLSDILRVNTEITKAPLSASMIKRYDEHHQDLTLLKALVRQQLPEKYKEIFFDQSKNGYAGYIDGGASQEEFYKFIKPILEKMDGTEELLVKLNREDLLRKQRTFDNGSIPHQIHLGELHAILRRQEDFYPFLKDNREKIEKILTFRIPYYVGPLARGNSRFAWMTRKSEETITPWNFEEVVDKGASAQSFIERMTNFDKNLPNEKVLPKHSLLYEYFTVYNELTKVKYVTEGMRKPAFLSGEQKKAIVDLLFKTNRKVTVKQLKEDYFKKIECFDSVEISGVEDRFNASLGTYHDLLKIIKDKDFLDNEENEDILEDIVLTLTLFEDREMIEERLKTYAHLFDDKVMKQLKRRRYTGWGRLSRKLINGIRDKQSGKTILDFLKSDGFANRNFMQLIHDDSLTFKEDIQKAQVSGQGDSLHEHIANLAGSPAIKKGILQTVKVVDELVKVMGRHKPENIVIEMARENQTTQKGQKNSRERMKRIEEGIKELGSQILKEHPVENTQLQNEKLYLYYLQNGRDMYVDQELDINRLSDYDVDHIVPQSFLKDDSIDNKVLTRSDKNRGKSDNVPSEEVVKKMKNYWRQLLNAKLITQRKFDNLTKAERGGLSELDKAGFIKRQLVETRQITKHVAQILDSRMNTKYDENDKLIREVKVITLKSKLVSDFRKDFQFYKVREINNYHHAHDAYLNAVVGTALIKKYPKLESEFVYGDYKVYDVRKMIAKSEQEIGKATAKYFFYSNIMNFFKTEITLANGEIRKRPLIETNGETGEIVWDKGRDFATVRKVLSMPQVNIVKKTEVQTGGFSKESILPKRNSDKLIARKKDWDPKKYGGFDSPTVAYSVLVVAKVEKGKSKKLKSVKELLGITIMERSSFEKNPIDFLEAKGYKEVKKDLIIKLPKYSLFELENGRKRMLASAGELQKGNELALPSKYVNFLYLASHYEKLKGSPEDNEQKQLFVEQHKHYLDEIIEQISEFSKRVILADANLDKVLSAYNKHRDKPIREQAENIIHLFTLTNLGAPAAFKYFDTTIDRKRYTSTKEVLDATLIHQSITGLYETRIDLSQLGGDSGGSANELTWHDVLAEEKQQPYFLNTLQTVASERQSGVTIYPPQKDVFNAFRFTELGDVKVVILGQDPYHGPGQAHGLAFSVRPGIAIPPSLLNMYKELENTIPGFTRPNHGYLESWARQGVLLLNTVLTVRAGQAHSHASLGWETFTDKVISLINQHREGVVFLLWGSHAQKKGAIIDKQRHHVLKAPHPSPLSAHRGFFGCNHFVLANQWLEQRGETPIDWMPVLPAESESGGSPKKKRKVGGGGSGATNFSLLKQAGDVEENPGPMVSKGEELFTGVVPILVELDGDVNGHKFSVSGEGEGDATYGKLTLKFICTTGKLPVPWPTLVTTLTYGVQCFSRYPDHMKQHDFFKSAMPEGYVQERTIFFKDDGNYKTRAEVKFEGDTLVNRIELKGIDFKEDGNILGHKLEYNYNSHNVYIMADKQKNGIKVNFKIRHNIEDGSVQLADHYQQNTPIGDGPVLLPDNHYLSTQSALSKDPNEKRDHMVLLEFVTAAGITLGMDELYK

SEQ ID NO: 427 - protein, 1931 aa, Artificial Sequence
  Description of Artificial Sequence: Synthetic polypeptide
MKRTADGSEFESPKKKRKVSSETGPVAVDPTLRRRIEPHEFEVFFDPRELAKETCLLYEINWGGRHSIWRHTSQNTNKHVEVNFIEKFTTERYFCPNTRCSITWFLSWSPCGECSRAITEFLSRYPHVTLFIYIARLYHHADPRNRQGLRDLISSGVTIQIMTEQESGYCWRNFVNYSPSNEAHWPRYPHLWVRLYVLELYCIILGLPPCLNILRRKQPQLTFFTIALQSCHYQRLPPHILWATGLKSGGSSGGSSGSETPGTSESATPESSGGSSGGSDKKYSIGLAIGTNSVGWAVITDEYKVPSKKFKVLGNTDRHSIKKNLIGALLFDSGETAEATRLKRTARRRYTRRKNRICYLQEIFSNEMAKVDDSFFHRLEESFLVEEDKKHERHPIFGNIVDEVAYHEKYPTIYHLRKKLVDSTDKADLRLIYLALAHMIKFRGHFLIEGDLNPDNSDVDKLFIQLVQTYNQLFEENPINASGVDAKAILSARLSKSRRLENLIAQLPGEKKNGLFGNLIALSLGLTPNFKSNFDLAEDAKLQLSKDTYDDDLDNLLAQIGDQYADLFLAAKNLSDAILLSDILRVNTEITKAPLSASMIKRYDEHHQDLTLLKALVRQQLPEKYKEIFFDQSKNGYAGYIDGGASQEEFYKFIKPILEKMDGTEELLVKLNREDLLRKQRTFDNGSIPHQIHLGELHAILRRQEDFYPFLKDNREKIEKILTFRIPYYVGPLARGNSRFAWMTRKSEETITPWNFEEVVDKGASAQSFIERMTNFDKNLPNEKVLPKHSLLYEYFTVYNELTKVKYVTEGMRKPAFLSGEQKKAIVDLLFKTNRKVTVKQLKEDYFKKIECFDSVEISGVEDRFNASLGTYHDLLKIIKDKDFLDNEENEDILEDIVLTLTLFEDREMIEERLKTYAHLFDDKVMKQLKRRRYTGWGRLSRKLINGIRDKQSGKTILDFLKSDGFANRNFMQLIHDDSLTFKEDIQKAQVSGQGDSLHEHIANLAGSPAIKKGILQTVKVVDELVKVMGRHKPENIVIEMARENQTTQKGQKNSRERMKRIEEGIKELGSQILKEHPVENTQLQNEKLYLYYLQNGRDMYVDQELDINRLSDYDVDHIVPQSFLKDDSIDNKVLTRSDKNRGKSDNVPSEEVVKKMKNYWRQLLNAKLITQRKFDNLTKAERGGLSELDKAGFIKRQLVETRQITKHVAQILDSRMNTKYDENDKLIREVKVITLKSKLVSDFRKDFQFYKVREINNYHHAHDAYLNAVVGTALIKKYPKLESEFVYGDYKVYDVRKMIAKSEQEIGKATAKYFFYSNIMNFFKTEITLANGEIRKRPLIETNGETGEIVWDKGRDFATVRKVLSMPQVNIVKKTEVQTGGFSKESILPKRNSDKLIARKKDWDPKKYGGFDSPTVAYSVLVVAKVEKGKSKKLKSVKELLGITIMERSSFEKNPIDFLEAKGYKEVKKDLIIKLPKYSLFELENGRKRMLASAGELQKGNELALPSKYVNFLYLASHYEKLKGSPEDNEQKQLFVEQHKHYLDEIIEQISEFSKRVILADANLDKVLSAYNKHRDKPIREQAENIIHLFTLTNLGAPAAFKYFDTTIDRKRYTSTKEVLDATLIHQSITGLYETRIDLSQLGGDSGGSKRTADGSEFEPKKKRKVGGGGSGATNFSLLKQAGDVEENPGPMVSKGEELFTGVVPILVELDGDVNGHKFSVSGEGEGDATYGKLTLKFICTTGKLPVPWPTLVTTLTYGVQCFSRYPDHMKQHDFFKSAMPEGYVQERTIFFKDDGNYKTRAEVKFEGDTLVNRIELKGIDFKEDGNILGHKLEYNYNSHNVYIMADKQKNGIKVNFKIRHNIEDGSVQLADHYQQNTPIGDGPVLLPDNHYLSTQSALSKDPNEKRDHMVLLEFVTAAGITLGMDELYK

SEQ ID NO: 428 - protein, 2169 aa, Artificial Sequence
  Description of Artificial Sequence: Synthetic polypeptide
MKRTADGSEFESPKKKRKVANELTWHDVLAEEKQQPYFLNTLQTVASERQSGVTIYPPQKDVFNAFRFTELGDVKVVILGQDPYHGPGQAHGLAFSVRPGIAIPPSLLNMYKELENTIPGFTRPNHGYLESWARQGVLLLNTVLTVRAGQAHSHASLGWETFTDKVISLINQHREGVVFLLWGSHAQKKGAIIDKQRHHVLKAPHPSPLSAHRGFFGCNHFVLANQWLEQRGETPIDWMPVLPAESESGGSGGSGGSSSETGPVAVDPTLRRRIEPHEFEVFFDPRELAKETCLLYEINWGGRHSIWRHTSQNTNKHVEVNFIEKFTTERYFCPNTRCSITWFLSWSPCGECSRAITEFLSRYPHVTLFIYIARLYHHADPRNRQGLRDLISSGVTIQIMTEQESGYCWRNFVNYSPSNEAHWPRYPHLWVRLYVLELYCIILGLPPCLNILRRKQPQLTFFTIALQSCHYQRLPPHILWATGLKSGGSSGGSSGSETPGTSESATPESSGGSSGGSDKKYSIGLAIGTNSVGWAVITDEYKVPSKKFKVLGNTDRHSIKKNLIGALLFDSGETAEATRLKRTARRRYTRRKNRICYLQEIFSNEMAKVDDSFFHRLEESFLVEEDKKHERHPIFGNIVDEVAYHEKYPTIYHLRKKLVDSTDKADLRLIYLALAHMIKFRGHFLIEGDLNPDNSDVDKLFIQLVQTYNQLFEENPINASGVDAKAILSARLSKSRRLENLIAQLPGEKKNGLFGNLIALSLGLTPNFKSNFDLAEDAKLQLSKDTYDDDLDNLLAQIGDQYADLFLAAKNLSDAILLSDILRVNTEITKAPLSASMIKRYDEHHQDLTLLKALVRQQLPEKYKEIFFDQSKNGYAGYIDGGASQEEFYKFIKPILEKMDGTEELLVKLNREDLLRKQRTFDNGSIPHQIHLGELHAILRRQEDFYPFLKDNREKIEKILTFRIPYYVGPLARGNSRFAWMTRKSEETITPWNFEEVVDKGASAQSFIERMTNFDKNLPNEKVLPKHSLLYEYFTVYNELTKVKYVTEGMRKPAFLSGEQKKAIVDLLFKTNRKVTVKQLKEDYFKKIECFDSVEISGVEDRFNASLGTYHDLLKIIKDKDFLDNEENEDILEDIVLTLTLFEDREMIEERLKTYAHLFDDKVMKQLKRRRYTGWGRLSRKLINGIRDKQSGKTILDFLKSDGFANRNFMQLIHDDSLTFKEDIQKAQVSGQGDSLHEHIANLAGSPAIKKGILQTVKVVDELVKVMGRHKPENIVIEMARENQTTQKGQKNSRERMKRIEEGIKELGSQILKEHPVENTQLQNEKLYLYYLQNGRDMYVDQELDINRLSDYDVDHIVPQSFLKDDSIDNKVLTRSDKNRGKSDNVPSEEVVKKMKNYWRQLLNAKLITQRKFDNLTKAERGGLSELDKAGFIKRQLVETRQITKHVAQILDSRMNTKYDENDKLIREVKVITLKSKLVSDFRKDFQFYKVREINNYHHAHDAYLNAVVGTALIKKYPKLESEFVYGDYKVYDVRKMIAKSEQEIGKATAKYFFYSNIMNFFKTEITLANGEIRKRPLIETNGETGEIVWDKGRDFATVRKVLSMPQVNIVKKTEVQTGGFSKESIRPKRNSDKLIARKKDWDPKKYGGFVSPTVAYSVLVVAKVEKGKSKKLKSVKELLGITIMERSSFEKNPIDFLEAKGYKEVKKDLIIKLPKYSLFELENGRKRMLASARFLQKGNELALPSKYVNFLYLASHYEKLKGSPEDNEQKQLFVEQHKHYLDEIIEQISEFSKRVILADANLDKVLSAYNKHRDKPIREQAENIIHLFTLTNLGAPRAFKYFDTTIDRKVYRSTKEVLDATLIHQSITGLYETRIDLSQLGGDSGGSKRTADGSEFEPKKKRKVGGGGSGATNFSLLKQAGDVEENPGPMVSKGEELFTGVVPILVELDGDVNGHKFSVSGEGEGDATYGKLTLKFICTTGKLPVPWPTLVTTLTYGVQCFSRYPDHMKQHDFFKSAMPEGYVQERTIFFKDDGNYKTRAEVKFEGDTLVNRIELKGIDFKEDGNILGHKLEYNYNSHNVYIMADKQKNGIKVNFKIRHNIEDGSVQLADHYQQNTPIGDGPVLLPDNHYLSTQSALSKDPNEKRDHMVLLEFVTAAGITLGMDELYK

SEQ ID NO: 429 - protein, 1931 aa, Artificial Sequence
  Description of Artificial Sequence: Synthetic polypeptide
MKRTADGSEFESPKKKRKVSSETGPVAVDPTLRRRIEPHEFEVFFDPRELAKETCLLYEINWGGRHSIWRHTSQNTNKHVEVNFIEKFTTERYFCPNTRCSITWFLSWSPCGECSRAITEFLSRYPHVTLFIYIARLYHHADPRNRQGLRDLISSGVTIQIMTEQESGYCWRNFVNYSPSNEAHWPRYPHLWVRLYVLELYCIILGLPPCLNILRRKQPQLTFFTIALQSCHYQRLPPHILWATGLKSGGSSGGSSGSETPGTSESATPESSGGSSGGSDKKYSIGLAIGTNSVGWAVITDEYKVPSKKFKVLGNTDRHSIKKNLIGALLFDSGETAEATRLKRTARRRYTRRKNRICYLQEIFSNEMAKVDDSFFHRLEESFLVEEDKKHERHPIFGNIVDEVAYHEKYPTIYHLRKKLVDSTDKADLRLIYLALAHMIKFRGHFLIEGDLNPDNSDVDKLFIQLVQTYNQLFEENPINASGVDAKAILSARLSKSRRLENLIAQLPGEKKNGLFGNLIALSLGLTPNFKSNFDLAEDAKLQLSKDTYDDDLDNLLAQIGDQYADLFLAAKNLSDAILLSDILRVNTEITKAPLSASMIKRYDEHHQDLTLLKALVRQQLPEKYKEIFFDQSKNGYAGYIDGGASQEEFYKFIKPILEKMDGTEELLVKLNREDLLRKQRTFDNGSIPHQIHLGELHAILRRQEDFYPFLKDNREKIEKILTFRIPYYVGPLARGNSRFAWMTRKSEETITPWNFEEVVDKGASAQSFIERMTNFDKNLPNEKVLPKHSLLYEYFTVYNELTKVKYVTEGMRKPAFLSGEQKKAIVDLLFKTNRKVTVKQLKEDYFKKIECFDSVEISGVEDRFNASLGTYHDLLKIIKDKDFLDNEENEDILEDIVLTLTLFEDREMIEERLKTYAHLFDDKVMKQLKRRRYTGWGRLSRKLINGIRDKQSGKTILDFLKSDGFANRNFMQLIHDDSLTFKEDIQKAQVSGQGDSLHEHIANLAGSPAIKKGILQTVKVVDELVKVMGRHKPENIVIEMARENQTTQKGQKNSRERMKRIEEGIKELGSQILKEHPVENTQLQNEKLYLYYLQNGRDMYVDQELDINRLSDYDVDHIVPQSFLKDDSIDNKVLTRSDKNRGKSDNVPSEEVVKKMKNYWRQLLNAKLITQRKFDNLTKAERGGLSELDKAGFIKRQLVETRQITKHVAQILDSRMNTKYDENDKLIREVKVITLKSKLVSDFRKDFQFYKVREINNYHHAHDAYLNAVVGTALIKKYPKLESEFVYGDYKVYDVRKMIAKSEQEIGKATAKYFFYSNIMNFFKTEITLANGEIRKRPLIETNGETGEIVWDKGRDFATVRKVLSMPQVNIVKKTEVQTGGFSKESIRPKRNSDKLIARKKDWDPKKYGGFVSPTVAYSVLVVAKVEKGKSKKLKSVKELLGITIMERSSFEKNPIDFLEAKGYKEVKKDLIIKLPKYSLFELENGRKRMLASARFLQKGNELALPSKYVNFLYLASHYEKLKGSPEDNEQKQLFVEQHKHYLDEIIEQISEFSKRVILADANLDKVLSAYNKHRDKPIREQAENIIHLFTLTNLGAPRAFKYFDTTIDRKVYRSTKEVLDATLIHQSITGLYETRIDLSQLGGDSGGSKRTADGSEFEPKKKRKVGGGGSGATNFSLLKQAGDVEENPGPMVSKGEELFTGVVPILVELDGDVNGHKFSVSGEGEGDATYGKLTLKFICTTGKLPVPWPTLVTTLTYGVQCFSRYPDHMKQHDFFKSAMPEGYVQERTIFFKDDGNYKTRAEVKFEGDTLVNRIELKGIDFKEDGNILGHKLEYNYNSHNVYIMADKQKNGIKVNFKIRHNIEDGSVQLADHYQQNTPIGDGPVLLPDNHYLSTQSALSKDPNEKRDHMVLLEFVTAAGITLGMDELYK

SEQ ID NO: 430 - protein, 2169 aa, Artificial Sequence
  Description of Artificial Sequence: Synthetic polypeptide
MKRTADGSEFESPKKKRKVANELTWHDVLAEEKQQPYFLNTLQTVASERQSGVTIYPPQKDVFNAFRFTELGDVKVVILGQDPYHGPGQAHGLAFSVRPGIAIPPSLLNMYKELENTIPGFTRPNHGYLESWARQGVLLLNTVLTVRAGQAHSHASLGWETFTDKVISLINQHREGVVFLLWGSHAQKKGAIIDKQRHHVLKAPHPSPLSAHRGFFGCNHFVLANQWLEQRGETPIDWMPVLPAESESGGSGGSGGSSSETGPVAVDPTLRRRIEPHEFEVFFDPRELAKETCLLYEINWGGRHSIWRHTSQNTNKHVEVNFIEKFTTERYFCPNTRCSITWFLSWSPCGECSRAITEFLSRYPHVTLFIYIARLYHHADPRNRQGLRDLISSGVTIQIMTEQESGYCWRNFVNYSPSNEAHWPRYPHLWVRLYVLELYCIILGLPPCLNILRRKQPQLTFFTIALQSCHYQRLPPHILWATGLKSGGSSGGSSGSETPGTSESATPESSGGSSGGSDKKYSIGLAIGTNSVGWAVITDEYKVPSKKFKVLGNTDRHSIKKNLIGALLFDSGETAEATRLKRTARRRYTRRKNRICYLQEIFSNEMAKVDDSFFHRLEESFLVEEDKKHERHPIFGNIVDEVAYHEKYPTIYHLRKKLVDSTDKADLRLIYLALAHMIKFRGHFLIEGDLNPDNSDVDKLFIQLVQTYNQLFEENPINASGVDAKAILSARLSKSRRLENLIAQLPGEKKNGLFGNLIALSLGLTPNFKSNFDLAEDAKLQLSKDTYDDDLDNLLAQIGDQYADLFLAAKNLSDAILLSDILRVNTEITKAPLSASMIKRYDEHHQDLTLLKALVRQQLPEKYKEIFFDQSKNGYAGYIDGGASQEEFYKFIKPILEKMDGTEELLVKLNREDLLRKQRTFDNGSIPHQIHLGELHAILRRQEDFYPFLKDNREKIEKILTFRIPYYVGPLARGNSRFAWMTRKSEETITPWNFEEVVDKGASAQSFIERMTNFDKNLPNEKVLPKHSLLYEYFTVYNELTKVKYVTEGMRKPAFLSGEQKKAIVDLLFKTNRKVTVKQLKEDYFKKIECFDSVEISGVEDRFNASLGTYHDLLKIIKDKDFLDNEENEDILEDIVLTLTLFEDREMIEERLKTYAHLFDDKVMKQLKRRRYTGWGRLSRKLINGIRDKQSGKTILDFLKSDGFANRNFMQLIHDDSLTFKEDIQKAQVSGQGDSLHEHIANLAGSPAIKKGILQTVKVVDELVKVMGRHKPENIVIEMARENQTTQKGQKNSRERMKRIEEGIKELGSQILKEHPVENTQLQNEKLYLYYLQNGRDMYVDQELDINRLSDYDVDHIVPQSFLKDDSIDNKVLTRSDKNRGKSDNVPSEEVVKKMKNYWRQLLNAKLITQRKFDNLTKAERGGLSELDKAGFIKRQLVETRQITKHVAQILDSRMNTKYDENDKLIREVKVITLKSKLVSDFRKDFQFYKVREINNYHHAHDAYLNAVVGTALIKKYPKLESEFVYGDYKVYDVRKMIAKSEQEIGKATAKYFFYSNIMNFFKTEITLANGEIRKRPLIETNGETGEIVWDKGRDFATVRKVLSMPQVNIVKKTEVQTGGFSKESILPKRNSDKLIARKKDWDPKKYGGFVSPTVAYSVLVVAKVEKGKSKKLKSVKELLGITIMERSSFEKNPIDFLEAKGYKEVKKDLIIKLPKYSLFELENGRKRMLASARELQKGNELALPSKYVNFLYLASHYEKLKGSPEDNEQKQLFVEQHKHYLDEIIEQISEFSKRVILADANLDKVLSAYNKHRDKPIREQAENIIHLFTLTNLGAPAAFKYFDTTIDRKQYRSTKEVLDATLIHQSITGLYETRIDLSQLGGDSGGSKRTADGSEFEPKKKRKVGGGGSGATNFSLLKQAGDVEENPGPMVSKGEELFTGVVPILVELDGDVNGHKFSVSGEGEGDATYGKLTLKFICTTGKLPVPWPTLVTTLTYGVQCFSRYPDHMKQHDFFKSAMPEGYVQERTIFFKDDGNYKTRAEVKFEGDTLVNRIELKGIDFKEDGNILGHKLEYNYNSHNVYIMADKQKNGIKVNFKIRHNIEDGSVQLADHYQQNTPIGDGPVLLPDNHYLSTQSALSKDPNEKRDHMVLLEFVTAAGITLGMDELYK

SEQ ID NO: 431 - protein, 1931 aa, Artificial Sequence
  Description of Artificial Sequence: Synthetic polypeptide
MKRTADGSEFESPKKKRKVSSETGPVAVDPTLRRRIEPHEFEVFFDPRELAKETCLLYEINWGGRHSIWRHTSQNTNKHVEVNFIEKFTTERYFCPNTRCSITWFLSWSPCGECSRAITEFLSRYPHVTLFIYIARLYHHADPRNRQGLRDLISSGVTIQIMTEQESGYCWRNFVNYSPSNEAHWPRYPHLWVRLYVLELYCIILGLPPCLNILRRKQPQLTFFTIALQSCHYQRLPPHILWATGLKSGGSSGGSSGSETPGTSESATPESSGGSSGGSDKKYSIGLAIGTNSVGWAVITDEYKVPSKKFKVLGNTDRHSIKKNLIGALLFDSGETAEATRLKRTARRRYTRRKNRICYLQEIFSNEMAKVDDSFFHRLEESFLVEEDKKHERHPIFGNIVDEVAYHEKYPTIYHLRKKLVDSTDKADLRLIYLALAHMIKFRGHFLIEGDLNPDNSDVDKLFIQLVQTYNQLFEENPINASGVDAKAILSARLSKSRRLENLIAQLPGEKKNGLFGNLIALSLGLTPNFKSNFDLAEDAKLQLSKDTYDDDLDNLLAQIGDQYADLFLAAKNLSDAILLSDILRVNTEITKAPLSASMIKRYDEHHQDLTLLKALVRQQLPEKYKEIFFDQSKNGYAGYIDGGASQEEFYKFIKPILEKMDGTEELLVKLNREDLLRKQRTFDNGSIPHQIHLGELHAILRRQEDFYPFLKDNREKIEKILTFRIPYYVGPLARGNSRFAWMTRKSEETITPWNFEEVVDKGASAQSFIERMTNFDKNLPNEKVLPKHSLLYEYFTVYNELTKVKYVTEGMRKPAFLSGEQKKAIVDLLFKTNRKVTVKQLKEDYFKKIECFDSVEISGVEDRFNASLGTYHDLLKIIKDKDFLDNEENEDILEDIVLTLTLFEDREMIEERLKTYAHLFDDKVMKQLKRRRYTGWGRLSRKLINGIRDKQSGKTILDFLKSDGFANRNFMQLIHDDSLTFKEDIQKAQVSGQGDSLHEHIANLAGSPAIKKGILQTVKVVDELVKVMGRHKPENIVIEMARENQTTQKGQKNSRERMKRIEEGIKELGSQILKEHPVENTQLQNEKLYLYYLQNGRDMYVDQELDINRLSDYDVDHIVPQSFLKDDSIDNKVLTRSDKNRGKSDNVPSEEVVKKMKNYWRQLLNAKLITQRKFDNLTKAERGGLSELDKAGFIKRQLVETRQITKHVAQILDSRMNTKYDENDKLIREVKVITLKSKLVSDFRKDFQFYKVREINNYHHAHDAYLNAVVGTALIKKYPKLESEFVYGDYKVYDVRKMIAKSEQEIGKATAKYFFYSNIMNFFKTEITLANGEIRKRPLIETNGETGEIVWDKGRDFATVRKVLSMPQVNIVKKTEVQTGGFSKESILPKRNSDKLIARKKDWDPKKYGGFVSPTVAYSVLVVAKVEKGKSKKLKSVKELLGITIMERSSFEKNPIDFLEAKGYKEVKKDLIIKLPKYSLFELENGRKRMLASARELQKGNELALPSKYVNFLYLASHYEKLKGSPEDNEQKQLFVEQHKHYLDEIIEQISEFSKRVILADANLDKVLSAYNKHRDKPIREQAENIIHLFTLTNLGAPAAFKYFDTTIDRKQYRSTKEVLDATLIHQSITGLYETRIDLSQLGGDSGGSKRTADGSEFEPKKKRKVGGGGSGATNFSLLKQAGDVEENPGPMVSKGEELFTGVVPILVELDGDVNGHKFSVSGEGEGDATYGKLTLKFICTTGKLPVPWPTLVTTLTYGVQCFSRYPDHMKQHDFFKSAMPEGYVQERTIFFKDDGNYKTRAEVKFEGDTLVNRIELKGIDFKEDGNILGHKLEYNYNSHNVYIMADKQKNGIKVNFKIRHNIEDGSVQLADHYQQNTPIGDGPVLLPDNHYLSTQSALSKDPNEKRDHMVLLEFVTAAGITLGMDELYK

SEQ ID NO: 432 - protein, 2117 aa, Artificial Sequence
  Description of Artificial Sequence: Synthetic polypeptide
MKRTADGSEFESPKKKRKVDKKYSIGLDIGTNSVGWAVITDEYKVPSKKFKVLGNTDRHSIKKNLIGALLFDSGETAEATRLKRTARRRYTRRKNRICYLQEIFSNEMAKVDDSFFHRLEESFLVEEDKKHERHPIFGNIVDEVAYHEKYPTIYHLRKKLVDSTDKADLRLIYLALAHMIKFRGHFLIEGDLNPDNSDVDKLFIQLVQTYNQLFEENPINASGVDAKAILSARLSKSRRLENLIAQLPGEKKNGLFGNLIALSLGLTPNFKSNFDLAEDAKLQLSKDTYDDDLDNLLAQIGDQYADLFLAAKNLSDAILLSDILRVNTEITKAPLSASMIKRYDEHHQDLTLLKALVRQQLPEKYKEIFFDQSKNGYAGYIDGGASQEEFYKFIKPILEKMDGTEELLVKLNREDLLRKQRTFDNGSIPHQIHLGELHAILRRQEDFYPFLKDNREKIEKILTFRIPYYVGPLARGNSRFAWMTRKSEETITPWNFEEVVDKGASAQSFIERMTNFDKNLPNEKVLPKHSLLYEYFTVYNELTKVKYVTEGMRKPAFLSGEQKKAIVDLLFKTNRKVTVKQLKEDYFKKIECFDSVEISGVEDRFNASLGTYHDLLKIIKDKDFLDNEENEDILEDIVLTLTLFEDREMIEERLKTYAHLFDDKVMKQLKRRRYTGWGRLSRKLINGIRDKQSGKTILDFLKSDGFANRNFMQLIHDDSLTFKEDIQKAQVSGQGDSLHEHIANLAGSPAIKKGILQTVKVVDELVKVMGRHKPENIVIEMARENQTTQKGQKNSRERMKRIEEGIKELGSQILKEHPVENTQLQNEKLYLYYLQNGRDMYVDQELDINRLSDYDVDAIVPQSFLKDDSIDNKVLTRSDKNRGKSDNVPSEEVVKKMKNYWRQLLNAKLITQRKFDNLTKAERGGLSELDKAGFIKRQLVETRQITKHVAQILDSRMNTKYDENDKLIREVKVITLKSKLVSDFRKDFQFYKVREINNYHHAHDAYLNAVVGTALIKKYPKLESEFVYGDYKVYDVRKMIAKSEQEIGKATAKYFFYSNIMNFFKTEITLANGEIRKRPLIETNGETGEIVWDKGRDFATVRKVLSMPQVNIVKKTEVQTGGFSKESILPKRNSDKLIARKKDWDPKKYGGFDSPTVAYSVLVVAKVEKGKSKKLKSVKELLGITIMERSSFEKNPIDFLEAKGYKEVKKDLIIKLPKYSLFELENGRKRMLASAGELQKGNELALPSKYVNFLYLASHYEKLKGSPEDNEQKQLFVEQHKHYLDEIIEQISEFSKRVILADANLDKVLSAYNKHRDKPIREQAENIIHLFTLTNLGAPAAFKYFDTTIDRKRYTSTKEVLDATLIHQSITGLYETRIDLSQLGGDSGGSSGGSSGSETPGTSESATPESSGGSSGGSSTLNIEDEYRLHETSKEPDVSLGSTWLSDFPQAWAETGGMGLAVRQAPLIIPLKATSTPVSIKQYPMSQEARLGIKPHIQRLLDQGILVPCQSPWNTPLLPVKKPGTNDYRPVQDLREVNKRVEDIHPTVPNPYNLLSGLPPSHQWYTVLDLKDAFFCLRLHPTSQPLFAFEWRDPEMGISGQLTWTRLPQGFKNSPTLFDEALHRDLADFRIQHPDLILLQYVDDLLLAATSELDCQQGTRALLQTLGNLGYRASAKKAQICQKQVKYLGYLLKEGQRWLTEARKETVMGQPTPKTPRQLREFLGTAGFCRLWIPGFAEMAAPLYPLTKTGTLFNWGPDQQKAYQEIKQALLTAPALGLPDLTKPFELFVDEKQGYAKGVLTQKLGPWRRPVAYLSKKLDPVAAGWPPCLRMVAAIAVLTKDAGKLTMGQPLVILAPHAVEALVKQPPDRWLSNARMTHYQALLLDTDRVQFGPVVALNPATLLPLPEEGLQHNCLDILAEAHGTRPDLTDQPLPDADHTWYTDGSSLLQEGQRKAGAAVTTETEVIWAKALPAGTSAQRAELIALTQALKMAEGKKLNVYTDSRYAFATAHIHGEIYRRRGLLTSEGKEIKNKDEILALLKALFLPKRLSIIHCPGHQKGHSAEARGNRMADQAARKAAITETPDTSTLLIENSSPSGGSKRTADGSEFEPKKKRKV

SEQ ID NO: 433 - protein, 2117 aa, Artificial Sequence
  Description of Artificial Sequence: Synthetic polypeptide
MKRTADGSEFESPKKKRKVDKKYSIGLDIGTNSVGWAVITDEYKVPSKKFKVLGNTDRHSIKKNLIGALLFDSGETAEATRLKRTARRRYTRRKNRICYLQEIFSNEMAKVDDSFFHRLEESFLVEEDKKHERHPIFGNIVDEVAYHEKYPTIYHLRKKLVDSTDKADLRLIYLALAHMIKFRGHFLIEGDLNPDNSDVDKLFIQLVQTYNQLFEENPINASGVDAKAILSARLSKSRRLENLIAQLPGEKKNGLFGNLIALSLGLTPNFKSNFDLAEDAKLQLSKDTYDDDLDNLLAQIGDQYADLFLAAKNLSDAILLSDILRVNTEITKAPLSASMIKRYDEHHQDLTLLKALVRQQLPEKYKEIFFDQSKNGYAGYIDGGASQEEFYKFIKPILEKMDGTEELLVKLNREDLLRKQRTFDNGSIPHQIHLGELHAILRRQEDFYPFLKDNREKIEKILTFRIPYYVGPLARGNSRFAWMTRKSEETITPWNFEEVVDKGASAQSFIERMTNFDKNLPNEKVLPKHSLLYEYFTVYNELTKVKYVTEGMRKPAFLSGEQKKAIVDLLFKTNRKVTVKQLKEDYFKKIECFDSVEISGVEDRFNASLGTYHDLLKIIKDKDFLDNEENEDILEDIVLTLTLFEDREMIEERLKTYAHLFDDKVMKQLKRRRYTGWGRLSRKLINGIRDKQSGKTILDFLKSDGFANRNFMQLIHDDSLTFKEDIQKAQVSGQGDSLHEHIANLAGSPAIKKGILQTVKVVDELVKVMGRHKPENIVIEMARENQTTQKGQKNSRERMKRIEEGIKELGSQILKEHPVENTQLQNEKLYLYYLQNGRDMYVDQELDINRLSDYDVDAIVPQSFLKDDSIDNKVLTRSDKNRGKSDNVPSEEVVKKMKNYWRQLLNAKLITQRKFDNLTKAERGGLSELDKAGFIKRQLVETRQITKHVAQILDSRMNTKYDENDKLIREVKVITLKSKLVSDFRKDFQFYKVREINNYHHAHDAYLNAVVGTALIKKYPKLESEFVYGDYKVYDVRKMIAKSEQEIGKATAKYFFYSNIMNFFKTEITLANGEIRKRPLIETNGETGEIVWDKGRDFATVRKVLSMPQVNIVKKTEVQTGGFSKESILPKRNSDKLIARKKDWDPKKYGGFDSPTVAYSVLVVAKVEKGKSKKLKSVKELLGITIMERSSFEKNPIDFLEAKGYKEVKKDLIIKLPKYSLFELENGRKRMLASAGELQKGNELALPSKYVNFLYLASHYEKLKGSPEDNEQKQLFVEQHKHYLDEIIEQISEFSKRVILADANLDKVLSAYNKHRDKPIREQAENIIHLFTLTNLGAPAAFKYFDTTIDRKRYTSTKEVLDATLIHQSITGLYETRIDLSQLGGDSGGSSGGSSGSETPGTSESATPESSGGSSGGSSTLNIEDEYRLHETSKEPDVSLGSTWLSDFPQAWAETGGMGLAVRQAPLIIPLKATSTPVSIKQYPMSQEARLGIKPHIQRLLDQGILVPCQSPWNTPLLPVKKPGTNDYRPVQDLREVNKRVEDIHPTVPNPYNLLSGLPPSHQWYTVLDLKDAFFCLRLHPTSQPLFAFEWRDPEMGISGQLTWTRLPQGFKNSPTLFNEALHRDLADFRIQHPDLILLQYVDDLLLAATSELDCQQGTRALLQTLGNLGYRASAKKAQICQKQVKYLGYLLKEGQRWLTEARKETVMGQPTPKTPRQLREFLGKAGFCRLFIPGFAEMAAPLYPLTKPGTLFNWGPDQQKAYQEIKQALLTAPALGLPDLTKPFELFVDEKQGYAKGVLTQKLGPWRRPVAYLSKKLDPVAAGWPPCLRMVAAIAVLTKDAGKLTMGQPLVILAPHAVEALVKQPPDRWLSNARMTHYQALLLDTDRVQFGPVVALNPATLLPLPEEGLQHNCLDILAEAHGTRPDLTDQPLPDADHTWYTDGSSLLQEGQRKAGAAVTTETEVIWAKALPAGTSAQRAELIALTQALKMAEGKKLNVYTDSRYAFATAHIHGEIYRRRGWLTSEGKEIKNKDEILALLKALFLPKRLSIIHCPGHQKGHSAEARGNRMADQAARKAAITETPDTSTLLIENSSPSGGSKRTADGSEFEPKKKRKV

SEQ ID NO: 434 - protein, 639 aa, Unknown
  Description of Unknown: CRISPR-associated transposase sequence from cyanobacteria
MSQITIQARLISFESNRQQLWKLMADLNTPLINELLCQLGQHPDFEKWQQKGKLPSTVVSQLCQPLKTDPRFAGQPSRLYMSAIHIVDYIYKSWLAIQKRLQQQLDGKTRWLEMLNSDAELVELSGDTLEAIRVKAAEILAIAMPASESDSASPKGKKGKKEKKPSSSSPKRSLSKTLFDAYQETEDIKSRSAISYLLKNGCKLTDKEEDSEKFAKRRRQVEIQIQRLTEKLISRMPKGRDLTNAKWLETLLTATTTVAEDNAQAKRWQDILLTRSSSLPFPLVFETNEDMVWSKNQKGRLCVHFNGLSDLIFEVYCGNRQLHWFQRFLEDQQTKRKSKNQHSSGLFTLRNGHLVWLEGEGKGEPWNLHHLTLYCCVDNRLWTEEGTEIVRQEKADEITKFITNMKKKSDLSDTQQALIQRKQSTLTRINNSFERPSQPLYQGQSHILVGVSLGLEKPATVAVVDAIANKVLAYRSIKQLLGDNYELLNRQRRQQQYLSHERHKAQKNFSPNQFGASELGQHIDRLLAKAIVALARTYKAGSIVLPKLGDMREVVQSEIQAIAEQKFPGYIEGQQKYAKQYRVNVHRWSYGRLIQSIQSKAAQTGIVIEEGKQPIRGSPHDKAKELALSAYNLRLTRRS

SEQ ID NO: 435 - protein, 167 aa, Unknown
  Description of Unknown: CRISPR-associated transposase sequence from cyanobacteria
MIEAPDVKPWLFLIKPYEGESLSHFLGRFRRANHLSASGLGTLAGIGAIVARWERFHFNPRPSQQELEAIASVVEVDAQRLAQMLPPAGVGMQHEPIRLCGACYAESPCHRIEWQYKSVWKCDRHQLKILAKCPNCQAPFKMPALWEDGCCHRCRMPFAEMAKLQKV

SEQ ID NO: 436 - protein, 584 aa, Scytonema hofmannii
MNSQQNPDLAVHPLAIPMEGLLGESATTLEKNVIATQLSEEAQVKLEVIQSLLEPCDRTTYGQKLREAAEKLNVSLRTVQRLVKNWEQDGLVGLTQTSRADKGKHRIGEFWENFITKTYKEGNKGSKRMTPKQVALRVEAKARELKDSKPPNYKTVLRVLAPILEKQQKAKSIRSPGWRGTTLSVKTREGKDLSVDYSNHVWQCDHTRVDVLLVDQHGEILSRPWLTTVIDTYSRCIMGINLGFDAPSSGVVALALRHAILPKRYGSEYKLHCEWGTYGKPEHFYTDGGKDFRSNHLSQIGAQLGFVCHLRDRPSEGGVVERPFKTLNDQLFSTLPGYTGSNVQERPEDAEKDARLTLRELEQLLVRYIVDRYNQSIDARMGDQTRFERWEAGLPTVPVPIPERDLDICLMKQSRRTVQRGGCLQFQNLMYRGEYLAGYAGETVNLRFDPRDITTILVYRQENNQEVFLTRAHAQGLETEQLALDEAEAASRRLRTAGKTISNQSLLQEVVDRDALVATKKSRKERQKLEQTVLRSAAVDESNRESLPSQIVEPDEVESTETVHSQYEDIEVWDYEQLREEYGF

SEQ ID NO: 437 - protein, 276 aa, Unknown
  Description of Unknown: CRISPR-associated transposase sequence from cyanobacteria
MTEAQAIAKQLGGVKPDDEWLQAEIARLKGKSIVPLQQVKTLHDWLDGKRKARKSCRVVGESRTGKTVACDAYRYRHKPQQEAGRPPTVPVVYIRPHQKCGPKDLFKKITEYLKYRVTKGTVSDFRDRTIEVLKGCGVEMLIIDEADRLKPETFADVRDIAEDLGIAVVLVGTDRLDAVIKRDEQVLERFRAHLRFGKLSGEDFKNTVEMWEQMVLKLPVSSNLKSKEMLRILTSATEGYIGRLDEILREAAIRSLSRGLKKIDKAVLQEVAKEYK

SEQ ID NO: 438 - protein, 1344 aa, Artificial Sequence
  Description of Artificial Sequence: Synthetic polypeptide
MFLQRPKPYSDESLESFFIRVANKNGYGDVHRFLEATKRFLQDIDHNGYQTFPTDITRINPYSAKNSSSARTASFLKLAQLTFNEPPELLGLAINRTNMKYSPSTSAVVRGAEVFPRSLLRTHSIPCCPLCLRENGYASYLWHFQGYEYCHSHNVPLITTCSCGKEFDYRVSGLKGICCKCKEPITLTSRENGHEAACTVSNWLAGHESKPLPNLPKSYRWGLVHWWMGIKDSEFDHFSFVQFFSNWPRSFHSIIEDEVEFNLEHAVVSTSELRLKDLLGRLFFGSIRLPERNLQHNIILGELLCYLENRLWQDKGLIANLKMNALEATVMLNCSLDQIASMVEQRILKPNRKSKPNSPLDVTDYLFHFGDIFCLWLAEFQSDEFNRSFYVSRWMQTLKELIASNPDDLTTELKRAFRPLTPHIAIDGNELDALTILVNLTDKTDDQKDLLDRAKCKQKLRDEKWWASCINCVNYRQSHNPKFPDIRSEGVIRTQALGELPSFLLSSSKIPPYHWSYSHDSKYVNKSAFLTNEFCWDGEISCLGELLKDADHPLWNTLKKLGCSQKTCKAMAKQLADITLTTINVTLAPNYLTQISLPDSDTSYISLSPVASLSMQSHFHQRLQDENRHSAITRFSRTTNMGVTAMTCGGAFRMLKSGAKFSSPPHHRLNSKRSWLTSEHVQSLKQYQRLNKSLIPENSRIALRRKYKIELQNMVRSWFAMQDHTLDSNILIQHLNHDLSYLGATKRFAYDPAMTKLFTELLKRELSNSINNGEQHTNGSFLVLPNIRVCGATALSSPVTVGIPSLTAFFGFVHAFERNINRTTSSFRVESFAICVHQLHVEKRGLTAEFVEKGDGTISAPATRDDWQCDVVFSLILNTNFAQHIDQDTLVTSLPKRLARGSAKIAIDDFKHINSFSTLETAIESLPIEAGRWLSLYAQSNNNLSDLLAAMTEDHQLMASCVGYHLLEEPKDKPNSLRGYKHAIAECIIGLINSITFSSETDPNTIFWSLKNYQNYLVVQPRSINDETTDKSSLMEAASLAYDVSGQPIKSATAEALAQGNPHQVDFCHVPYGASHIECSFSVSFSSELRQPYKCNSSKVKQTLVQLVELYETKIGWTELATRYLMNICNGKWLWKNTRKAYCWNIVLTPWPWNGEKVGFEDIRTNYTSRQDFKNNKNWSAIVEMIKTAFSSTDGLAIFEVRATLHLPTNAMVRPSQVFTEKESGSKSKSKTQNSRVFQSTTIDGERSPILGAFKTGAAIATIDDWYPEATEPLRVGRFGVHREDVTCYRHPSTGKDFFSILQQAEHYIEVLSANKTPAQETINDMHFLMANLIKGGMFQHKGD

SEQ ID NO: 439 - protein, 1163 aa, Artificial Sequence
  Description of Artificial Sequence: Synthetic polypeptide
MATSLPTPSAITTSALEYAFHTPARNLTKSRGKNIHRYVSVKMSKRITVESTLECDACYHFDFEPSIVRFCAQPIRFLYYLNGQSHSYVPDFLVQFDTNEFVLYEVKSAYAKNKPDFDVEWEAKVKAATELGLELELVEESDIRDTVVLNNLKRMHRYASKDELNNVHNSLLKIIKYNGAQSARCLGEQLGLKGRTVLPILCDLLSRCLLDTRLDKPLSLESRFELASYGMSETREARISRAKRAFVSTPSVRKILSYMDRCRDLSDLESEPTCMMVYGASGVGKTTVIKKYLNQNRRESEAGGDIIPVLHIELPDNAKPVDAARELLVEMGDPLALYETDLARLTKRLTELIPAVGVKLIIIDEFQHLVEERSNRVLTQVGNWLKMILNKTKCPIVIFGMPYSKVVLQANSQLHGRFSIQVELRPFSYQGGRGVFKTFLEYLDKALPFEKQAGLANESLQKKLYAFSQGNMRSLRNLIYQASIEAIDNQHETITEEDFVFASKLTSGDKPNSWKNPFEEGVEVTEDMLRPPPKDIGWEDYLRHSTPRVSKPGRNKNFFEMAKKGFSSFHRKAVSSQDTLESIELVSSANCLESVTYQDISAFPETIAVEINFRLSILRFLARKCETIVAKSIEPHRVELQQNYSRKIPSAITIYRWWLAFRKSDYNPISLAPNIKDRGNRETKVSTVVDSIMEQAVERVISGRKVNVSSAYKRVRRKVRQYNLTHGTKYTYPKYESVRKRVKKKTPFELLAAGKGERVAKREFRRMGKKILTSSVLERVEIDHTVVDLFAVHEEYRIPLGRPWLTQLVDCYSKAVIGFYLGFEPPSYVSVSLALKNAIQRKDDLISSYESIENEWLCYGIPDLLVTDNGKEFLSKAFDQACESLLINVHQNKVETPDNKPHVERNYGTINTSLLDDLPGKSFSQYLQREGYDSVGEATLTLNEIREIYLIWLVDIYHKKPNQRGTNCPNVAWKKGCQEWEPEEFSGSKDELDFKFAIVDYKQLTKVGITVYKELSYSNDRLAEYRGKKGNHKVQFKYNPECMAVIWVLDEDMNEYFTVNAIDYEYASRVSLWQHKYNMKYQAELNSAEYDEDKEIDAEIKIEEIADRSIVKTNKIRARRRGARHQENSARAKSISNANPASIQKHEDEIVSADNDDWDIDYV

SEQ ID NO: 440 - protein, 343 aa, Unknown
  Description of Unknown: Escherichia phage P1 (Bacteriophage P1) Cre Recombinase sequence
MSNLLTVHQNLPALPVDATSDEVRKNLMDMFRDRQAFSEHTWKMLLSVCRSWAAWCKLNNRKWFPAEPEDVRDYLLYLQARGLAVKTIQQHLGQLNMLHRRSGLPRPSDSNAVSLVMRRIRKENVDAGERAKQALAFERTDFDQVRSLMENSDRCQDIRNLAFLGIAYNTLLRIAEIARIRVKDISRTDGGRMLIHIGRTKTLVSTAGVEKALSLGVTKLVERWISVSGVADDPNNYLFCRVRKNGVAAPSATSQLSTRALEGIFEATHRLIYGAKDDSGQRYLAWSGHSARVGAARDMARAGVSIPEIMQAGGWTNVNIVMNYIRNLDSETGAMVRLLEDGD

SEQ ID NO: 441 - DNA, 20 bp, Artificial Sequence
  Description of Artificial Sequence: Synthetic oligonucleotide
gataaatagcccagggcgcc

SEQ ID NO: 442 - DNA, 20 bp, Artificial Sequence
  Description of Artificial Sequence: Synthetic oligonucleotide
gataaatagcccagggcgcc

SEQ ID NO: 443 - DNA, 20 bp, Artificial Sequence
  Description of Artificial Sequence: Synthetic oligonucleotide
gataaatagcccagggcgcc

SEQ ID NO: 444 - DNA, 20 bp, Artificial Sequence
  Description of Artificial Sequence: Synthetic oligonucleotide
gataaatagcccagggcgcc

SEQ ID NO: 445 - DNA, 20 bp, Artificial Sequence
  Description of Artificial Sequence: Synthetic oligonucleotide
gataaatagcccagggcgcc

SEQ ID NO: 446 - DNA, 20 bp, Artificial Sequence
  Description of Artificial Sequence: Synthetic oligonucleotide
gataaatagcccagggcgcc

SEQ ID NO: 447 - DNA, 20 bp, Artificial Sequence
  Description of Artificial Sequence: Synthetic oligonucleotide
gataaatagcccagggcgcc

SEQ ID NO: 448 - DNA, 20 bp, Artificial Sequence
  Description of Artificial Sequence: Synthetic oligonucleotide
gataaatagcccagggcgcc

SEQ ID NO: 449 - DNA, 20 bp, Artificial Sequence
  Description of Artificial Sequence: Synthetic oligonucleotide
gataaatagcccagggcgcc

SEQ ID NO: 450 - DNA, 20 bp, Artificial Sequence
  Description of Artificial Sequence: Synthetic oligonucleotide
gataaatagcccagggcgcc

SEQ ID NO: 451 - DNA, 20 bp, Artificial Sequence
  Description of Artificial Sequence: Synthetic oligonucleotide
gataaatagcccagggcgcc

SEQ ID NO: 452 - DNA, 20 bp, Artificial Sequence
  Description of Artificial Sequence: Synthetic oligonucleotide
cctccctccctgcccggtag

SEQ ID NO: 453 - DNA, 20 bp, Artificial Sequence
  Description of Artificial Sequence: Synthetic oligonucleotide
cctccctccctgcccggtag

SEQ ID NO: 454 - DNA, 20 bp, Artificial Sequence
  Description of Artificial Sequence: Synthetic oligonucleotide
cctccctccctgcccggtag

SEQ ID NO: 455 - DNA, 20 bp, Artificial Sequence
  Description of Artificial Sequence: Synthetic oligonucleotide
cctccctccctgcccggtag

SEQ ID NO: 456 - DNA, 20 bp, Artificial Sequence
  Description of Artificial Sequence: Synthetic oligonucleotide
cctccctccctgcccggtag

SEQ ID NO: 457 - DNA, 20 bp, Artificial Sequence
  Description of Artificial Sequence: Synthetic oligonucleotide
cctccctccctgcccggtag

SEQ ID NO: 458 - DNA, 20 bp, Artificial Sequence
  Description of Artificial Sequence: Synthetic oligonucleotide
cctccctccctgcccggtag

SEQ ID NO: 459 - DNA, 20 bp, Artificial Sequence
  Description of Artificial Sequence: Synthetic oligonucleotide
cctccctccctgcccggtag

SEQ ID NO: 460 - DNA, 20 bp, Artificial Sequence
  Description of Artificial Sequence: Synthetic oligonucleotide
cctccctccctgcccggtag

SEQ ID NO: 461 - DNA, 20 bp, Artificial Sequence
  Description of Artificial Sequence: Synthetic oligonucleotide
cctccctccctgcccggtag

SEQ ID NO: 462 - DNA, 20 bp, Artificial Sequence
  Description of Artificial Sequence: Synthetic oligonucleotide
cctccctccctgcccggtag

SEQ ID NO: 463 - DNA, 20 bp, Artificial Sequence
  Description of Artificial Sequence: Synthetic oligonucleotide
gaggtttggaaagggcgtgc

SEQ ID NO: 464 - DNA, 20 bp, Artificial Sequence
  Description of Artificial Sequence: Synthetic oligonucleotide
gaggtttggaaagggcgtgc

SEQ ID NO: 465 - DNA, 20 bp, Artificial Sequence
  Description of Artificial Sequence: Synthetic oligonucleotide
gaggtttggaaagggcgtgc

SEQ ID NO: 466 - DNA, 20 bp, Artificial Sequence
  Description of Artificial Sequence: Synthetic oligonucleotide
gaggtttggaaagggcgtgc

SEQ ID NO: 467 - DNA, 20 bp, Artificial Sequence
  Description of Artificial Sequence: Synthetic oligonucleotide
gaggtttggaaagggcgtgc

SEQ ID NO: 468 - DNA, 20 bp, Artificial Sequence
  Description of Artificial Sequence: Synthetic oligonucleotide
gaggtttggaaagggcgtgc

SEQ ID NO: 469 - DNA, 20 bp, Artificial Sequence
  Description of Artificial Sequence: Synthetic oligonucleotide
gaggtttggaaagggcgtgc

SEQ ID NO: 470 - DNA, 20 bp, Artificial Sequence
  Description of Artificial Sequence: Synthetic oligonucleotide
gaggtttggaaagggcgtgc

SEQ ID NO: 471 - DNA, 20 bp, Artificial Sequence
  Description of Artificial Sequence: Synthetic oligonucleotide
gaggtttggaaagggcgtgc

SEQ ID NO: 472 - DNA, 20 bp, Artificial Sequence
  Description of Artificial Sequence: Synthetic oligonucleotide
gaggtttggaaagggcgtgc

SEQ ID NO: 473 - DNA, 20 bp, Artificial Sequence
  Description of Artificial Sequence: Synthetic oligonucleotide
gaggtttggaaagggcgtgc

SEQ ID NO: 474 - DNA, 20 bp, Artificial Sequence
  Description of Artificial Sequence: Synthetic oligonucleotide
ggctcttctggcactggctt

SEQ ID NO: 475 - DNA, 20 bp, Artificial Sequence
  Description of Artificial Sequence: Synthetic oligonucleotide
ggatgagagaagagagtgct

SEQ ID NO: 476 - DNA, 21 bp, Artificial Sequence
  Description of Artificial Sequence: Synthetic oligonucleotide
gccctctcttcgcgcaggcct

SEQ ID NO: 477 - DNA, 20 bp, Artificial Sequence
  Description of Artificial Sequence: Synthetic oligonucleotide
gagcgcacacctgcccgacc

SEQ ID NO: 478 - RNA, 13 nt, Artificial Sequence
  Description of Artificial Sequence: Synthetic oligonucleotide
gccgccrccaugg

SEQ ID NO: 479 - DNA, 30 bp, Artificial Sequence
  Description of Artificial Sequence: Synthetic oligonucleotide
acatcttttctttgaggcttaaatagtatc

SEQ ID NO: 480 - DNA, 33 bp, Artificial Sequence
  Description of Artificial Sequence: Synthetic oligonucleotide
cggtcagggaatgaggtttttctgttttaacct

SEQ ID NO: 481 - DNA, 12 bp, Homo sapiens
ggcatttctggt

SEQ ID NO: 482 - DNA, 12 bp, Homo sapiens
caagaccagaga

SEQ ID NO: 483 - DNA, 12 bp, Homo sapiens
atgggaggcgca

SEQ ID NO: 484 - DNA, 12 bp, Homo sapiens
gcagagaaaagg

SEQ ID NO: 485 - DNA, 12 bp, Homo sapiens
gtttgggcctcc

SEQ ID NO: 486 - DNA, 12 bp, Homo sapiens
cctgtatggaac

SEQ ID NO: 487 - DNA, 12 bp, Homo sapiens
gtgtctacatgc

SEQ ID NO: 488 - DNA, 12 bp, Homo sapiens
caggaggaagtt

SEQ ID NO: 489 - DNA, 12 bp, Homo sapiens
agaaaaggctga

SEQ ID NO: 490 - DNA, 12 bp, Homo sapiens
tggaacaagcat

SEQ ID NO: 491 - DNA, 12 bp, Homo sapiens
aggaggaagttc

SEQ ID NO: 492 - DNA, 12 bp, Homo sapiens
agagcaaggaag

SEQ ID NO: 493 - DNA, 12 bp, Homo sapiens
ggaggggcgtct

SEQ ID NO: 494 - DNA, 12 bp, Homo sapiens
ggccccaaagag

SEQ ID NO: 495 - DNA, 12 bp, Homo sapiens
aggaggcccaaa

SEQ ID NO: 496 - DNA, 12 bp, Homo sapiens
ttagcgcctccc

SEQ ID NO: 497 - DNA, 12 bp, Homo sapiens
gggctggtttca

SEQ ID NO: 498 - DNA, 12 bp, Homo sapiens
taactggcagca

SEQ ID NO: 499 - DNA, 12 bp, Homo sapiens
acatgcatcact

SEQ ID NO: 500 - DNA, 12 bp, Homo sapiens
kgacttwgcact

SEQ ID NO: 501 - DNA, 12 bp, Homo sapiens
gtgctgattcct

SEQ ID NO: 502 - DNA, 12 bp, Homo sapiens
cactgccaaccc

SEQ ID NO: 503 - DNA, 12 bp, Homo sapiens
gggacaaaagtt

SEQ ID NO: 504 - DNA, 12 bp, Homo sapiens
tttctgacactg

SEQ ID NO: 505 - DNA, 12 bp, Homo sapiens
cagagaaaggct

SEQ ID NO: 506 - DNA, 12 bp, Homo sapiens
gagagagagaga

SEQ ID NO: 507 - DNA, 12 bp, Homo sapiens
gtgtgtgtgtgt

SEQ ID NO: 508 - DNA, 12 bp, Homo sapiens
tgtatgtgtgtg

SEQ ID NO: 509 - DNA, 12 bp, Homo sapiens
caywgtgtgtgt

SEQ ID NO: 510 - DNA, 12 bp, Homo sapiens
cggggtcgbagc

SEQ ID NO: 511 - DNA, 12 bp, Homo sapiens
gtttttctagaa

SEQ ID NO: 512 - DNA, 12 bp, Homo sapiens
atcatatcaaaa

SEQ ID NO: 513 - DNA, 12 bp, Homo sapiens
agaacagatgta

SEQ ID NO: 514 - DNA, 12 bp, Homo sapiens
tgtgtttcttca

SEQ ID NO: 515 - DNA, 12 bp, Homo sapiens
ggtttttcacct

SEQ ID NO: 516 - DNA, 12 bp, Homo sapiens
atagaaagaaat

SEQ ID NO: 517 - DNA, 12 bp, Homo sapiens
tstmtctgtmtg

SEQ ID NO: 518 - DNA, 12 bp, Homo sapiens
gmtcmtatctat

SEQ ID NO: 519 - DNA, 12 bp, Homo sapiens
gggggggggggg

SEQ ID NO: 520 - DNA, 12 bp, Homo sapiens
tatatatatata

SEQ ID NO: 521 - DNA, 12 bp, Homo sapiens
tctctctctttt

SEQ ID NO: 522 - DNA, 12 bp, Homo sapiens
tctttccttcct

SEQ ID NO: 523 - DNA, 12 bp, Homo sapiens
kggctggctggc

SEQ ID NO: 524 - DNA, 12 bp, Homo sapiens
atctgtcacccc

SEQ ID NO: 525 - DNA, 12 bp, Homo sapiens
gactccagacac

SEQ ID NO: 526 - DNA, 12 bp, Homo sapiens
tccagacacatc

SEQ ID NO: 527 - DNA, 12 bp, Homo sapiens
  modified_base (11)..(11): a, c, t, g, unknown or other
cacatggagcng

SEQ ID NO: 528 - DNA, 12 bp, Homo sapiens
agactccagacm

SEQ ID NO: 529 - DNA, 12 bp, Homo sapiens
gccctcacatcc

SEQ ID NO: 530 - DNA, 12 bp, Homo sapiens
gggacgcacatg

SEQ ID NO: 531 - DNA, 12 bp, Homo sapiens
bccagatcagcc

SEQ ID NO: 532 - DNA, 12 bp, Homo sapiens
cctagccagccr

SEQ ID NO: 533 - DNA, 12 bp, Homo sapiens
  modified_base (1)..(1): a, c, t, g, unknown or other
ncaaracthcas

SEQ ID NO: 534 - DNA, 12 bp, Homo sapiens
ccctacgttctc

SEQ ID NO: 535 - DNA, 12 bp, Homo sapiens
tgtcaccccatt

SEQ ID NO: 536 - DNA, 12 bp, Homo sapiens
tggaccttgaga

SEQ ID NO: 537 - DNA, 12 bp, Homo sapiens
tacaatggacct

SEQ ID NO: 538 - DNA, 12 bp, Homo sapiens
agctctcaaggt

SEQ ID NO: 539 - DNA, 12 bp, Homo sapiens
arcgtagggtag

SEQ ID NO: 540 - DNA, 12 bp, Homo sapiens
satggagcggtg

SEQ ID NO: 541 - DNA, 12 bp, Homo sapiens
aagaggacgacc

SEQ ID NO: 542 - DNA, 12 bp, Homo sapiens
tgactaccctac

SEQ ID NO: 543 - DNA, 12 bp, Homo sapiens
ggaccttggagc

SEQ ID NO: 544 - DNA, 12 bp, Homo sapiens
gcactggagcgg

SEQ ID NO: 545 - DNA, 12 bp, Homo sapiens
tggctggygtag

SEQ ID NO: 546 - DNA, 12 bp, Homo sapiens
gggccaccatca

SEQ ID NO: 547 - DNA, 12 bp, Homo sapiens
ttgtgcagcctc

SEQ ID NO: 548 - DNA, 12 bp, Homo sapiens
gccagccagmym

SEQ ID NO: 549 - DNA, 12 bp, Homo sapiens
tggctggctagg

SEQ ID NO: 550 - DNA, 12 bp, Homo sapiens
tgtctggagtct

SEQ ID NO: 551 - DNA, 12 bp, Homo sapiens
ccagccagctcm

SEQ ID NO: 552 - DNA, 12 bp, Homo sapiens
ccaagactccag

SEQ ID NO: 553 - DNA, 12 bp, Homo sapiens
ggggtgacagat

SEQ ID NO: 554 - DNA, 12 bp, Homo sapiens
taccctacgttc

SEQ ID NO: 555 - DNA, 12 bp, Homo sapiens
gccagatcagcc

SEQ ID NO: 556 - DNA, 12 bp, Homo sapiens
gactaccctacg

SEQ ID NO: 557 - DNA, 12 bp, Homo sapiens
cacatggagcss

SEQ ID NO: 558 - DNA, 12 bp, Homo sapiens
gctctcaaggtc

SEQ ID NO: 559 - DNA, 12 bp, Homo sapiens
gacgcacatgga

SEQ ID NO: 560 - DNA, 12 bp, Homo sapiens
catgtgcgtccc

SEQ ID NO: 561 - DNA, 12 bp, Homo sapiens
ctacgtttctcc

SEQ ID NO: 562 - DNA, 12 bp, Homo sapiens
agggtagtcaag

SEQ ID NO: 563 - DNA, 12 bp, Homo sapiens
gscgccatcttg

SEQ ID NO: 564 - DNA, 12 bp, Homo sapiens
caaggtccattg

SEQ ID NO: 565 - DNA, 12 bp, Homo sapiens
tcgccagggttg

SEQ ID NO: 566 - DNA, 12 bp, Homo sapiens
ggtcgtcctctt

SEQ ID NO: 567 - DNA, 12 bp, Homo sapiens
ggaaggggacac

SEQ ID NO: 568 - DNA, 12 bp, Homo sapiens
acgcaattactc

SEQ ID NO: 569 - DNA, 12 bp, Homo sapiens
ggcctggatcat

SEQ ID NO: 570 - DNA, 12 bp, Homo sapiens
gagagctctgtg

SEQ ID NO: 571 - DNA, 12 bp, Homo sapiens
cctggatcatgt

SEQ ID NO: 572 - DNA, 12 bp, Homo sapiens
gtggagttatgg

SEQ ID NO: 573 - DNA, 12 bp, Homo sapiens
cgctggctttgc

SEQ ID NO: 574 - DNA, 12 bp, Homo sapiens
gctcttgtggsc

SEQ ID NO: 575 - DNA, 12 bp, Homo sapiens
ttcccataactc

SEQ ID NO: 576 - DNA, 12 bp, Homo sapiens
atacagccaccg

SEQ ID NO: 577 - DNA, 12 bp, Homo sapiens
gcagacacagat

SEQ ID NO: 578 - DNA, 12 bp, Homo sapiens
agagcagcttgt

SEQ ID NO: 579 - DNA, 12 bp, Homo sapiens
aactcaggcact

SEQ ID NO: 580 - DNA, 12 bp, Homo sapiens
agcccacagagc

SEQ ID NO: 581 - DNA, 12 bp, Homo sapiens
ttgggaagttca

SEQ ID NO: 582 - DNA, 12 bp, Homo sapiens
actgctgtttca

SEQ ID NO: 583 - DNA, 12 bp, Homo sapiens
ctacctacatgg

SEQ ID NO: 584 - DNA, 12 bp, Homo sapiens
gctaatgatagc

SEQ ID NO: 585 - DNA, 12 bp, Homo sapiens
tgcrarccagcc

SEQ ID NO: 586 - DNA, 12 bp, Homo sapiens
ggggacagccac

SEQ ID NO: 587 - DNA, 12 bp, Homo sapiens
kacctyccccaa

SEQ ID NO: 588 - DNA, 12 bp, Homo sapiens
gvtcctggrtcs

SEQ ID NO: 589 - DNA, 12 bp, Homo sapiens
ctggtcattggt

SEQ ID NO: 590 - DNA, 12 bp, Homo sapiens
gctggtctgagt

SEQ ID NO: 591 - DNA, 12 bp, Homo sapiens
tatcagaggtca

SEQ ID NO: 592 - DNA, 12 bp, Homo sapiens
gagatatgggcc

SEQ ID NO: 593 - DNA, 12 bp, Homo sapiens
cctatctacgcc

SEQ ID NO: 594 - DNA, 12 bp, Homo sapiens
ggtttgccgcwg

SEQ ID NO: 595 - DNA, 12 bp, Homo sapiens
ctcagctgccac

SEQ ID NO: 596 - DNA, 12 bp, Homo sapiens
ggagctcacggg

SEQ ID NO: 597 - DNA, 12 bp, Homo sapiens
atattctaccgg

SEQ ID NO: 598 - DNA, 12 bp, Homo sapiens
gtctttacgaca

SEQ ID NO: 599 - DNA, 12 bp, Homo sapiens
ggaatattctac

SEQ ID NO: 600 - DNA, 12 bp, Homo sapiens
tttatgacaccg

SEQ ID NO: 601 - DNA, 12 bp, Homo sapiens
cggtggaggaat

SEQ ID NO: 602 - DNA, 12 bp, Homo sapiens
gagtctgtcccg

SEQ ID NO: 603 - DNA, 12 bp, Homo sapiens
ycyycycccyyy

SEQ ID NO: 604 - DNA, 12 bp, Homo sapiens
scgattggyygr

SEQ ID NO: 605 - DNA, 12 bp, Homo sapiens
aagggggtggag

SEQ ID NO: 606 - DNA, 12 bp, Homo sapiens
ggrrgaaarraa

SEQ ID NO: 607 - DNA, 12 bp, Homo sapiens
tvgccccgcccc

SEQ ID NO: 608 - DNA, 12 bp, Homo sapiens
cascagrgggca

SEQ ID NO: 609 - DNA, 12 bp, Homo sapiens
ccctcccccaac

SEQ ID NO: 610 - DNA, 12 bp, Homo sapiens
vtgcgcatgcgc

SEQ ID NO: 611 - DNA, 12 bp, Homo sapiens
attggcaggcgg

SEQ ID NO: 612 - DNA, 12 bp, Homo sapiens
cggtcacgtgac

SEQ ID NO: 613 - DNA, 12 bp, Homo sapiens
caccacctagtg

SEQ ID NO: 614 - DNA, 12 bp, Homo sapiens
ctacaaatccca

SEQ ID NO: 615 - DNA, 12 bp, Homo sapiens
cggaagtgacgt

SEQ ID NO: 616 - DNA, 12 bp, Homo sapiens
tttgtttgatct

SEQ ID NO: 617 - DNA, 12 bp, Homo sapiens
acagtacaaact

SEQ ID NO: 618 - DNA, 12 bp, Homo sapiens
ccgtgacgtcac

SEQ ID NO: 619 - DNA, 12 bp, Homo sapiens
ccaccaggggtc

SEQ ID NO: 620 - DNA, 12 bp, Homo sapiens
agggttgtggcc

SEQ ID NO: 621 - DNA, 12 bp, Homo sapiens
cgcaacctaacc

SEQ ID NO: 622 - DNA, 12 bp, Homo sapiens
gcccgaagctcc

SEQ ID NO: 623 - DNA, 12 bp, Homo sapiens
cagacggcctta

SEQ ID NO: 624 - DNA, 12 bp, Homo sapiens
cttattctcact

SEQ ID NO: 625 - DNA, 12 bp, Homo sapiens
taaagaagaagg

SEQ ID NO: 626 - DNA, 12 bp, Homo sapiens
tgtgtgtgtgcg

SEQ ID NO: 627 - DNA, 12 bp, Homo sapiens
gggggctgggca

SEQ ID NO: 628 - DNA, 12 bp, Homo sapiens
ggccaccacccc

SEQ ID NO: 629 - DNA, 12 bp, Homo sapiens
ggtggtggccat

SEQ ID NO: 630 - DNA, 12 bp, Homo sapiens
gcctgcccagcc

SEQ ID NO: 631 - DNA, 12 bp, Homo sapiens
grgggcgagggs

SEQ ID NO: 632 - DNA, 12 bp, Homo sapiens
aaaatggccacc

SEQ ID NO: 633 - DNA, 12 bp, Homo sapiens
mggagggtgggc

SEQ ID NO: 634 - DNA, 12 bp, Homo sapiens
ccaccacccctc

SEQ ID NO: 635 - DNA, 12 bp, Homo sapiens
gccaccaccctc

SEQ ID NO: 636 - DNA, 12 bp, Homo sapiens
ggcccacctcct

SEQ ID NO: 637 - DNA, 12 bp, Homo sapiens
gggggctggcag

SEQ ID NO: 638 - DNA, 12 bp, Homo sapiens
gcctgccccagc

SEQ ID NO: 639 - DNA, 12 bp, Homo sapiens
ccgcggcttcca

SEQ ID NO: 640 - DNA, 12 bp, Homo sapiens
gcctcgtcctgc

SEQ ID NO: 641 - DNA, 12 bp, Homo sapiens
stccccgcgcgy

SEQ ID NO: 642 - DNA, 12 bp, Homo sapiens
  modified_base (6)..(6): a, c, t, g, unknown or other
ccctcnsccctc

SEQ ID NO: 643 - DNA, 12 bp, Homo sapiens
ctgagctgtggg

SEQ ID NO: 644 - DNA, 12 bp, Homo sapiens
gtcagccgcggg

SEQ ID NO: 645 - DNA, 12 bp, Homo sapiens
aggcctcggctb

SEQ ID NO: 646 - DNA, 12 bp, Homo sapiens
acccaggactcg

SEQ ID NO: 647 - DNA, 12 bp, Homo sapiens
aggaccacctct

SEQ ID NO: 648 - DNA, 12 bp, Homo sapiens
cagcagctgaca

SEQ ID NO: 649 - DNA, 12 bp, Homo sapiens
ggcttckccagg

SEQ ID NO: 650 - DNA, 12 bp, Homo sapiens
tctkggctttkt

SEQ ID NO: 651 - DNA, 12 bp, Homo sapiens
tcagttgtagag

SEQ ID NO: 652 - DNA, 12 bp, Homo sapiens
ccaactggaggc

SEQ ID NO: 653 - DNA, 12 bp, Homo sapiens
agtgaatcacac

SEQ ID NO: 654 - DNA, 12 bp, Homo sapiens
ratmmcaactgg

SEQ ID NO: 655 - DNA, 12 bp, Homo sapiens
tgaatcacacac

SEQ ID NO: 656 - DNA, 12 bp, Homo sapiens
gacaccagggtt

SEQ ID NO: 657 - DNA, 12 bp, Homo sapiens
  modified_base (12)..(12): a, c, t, g, unknown or other
ggccaaagaggn

SEQ ID NO: 658 - DNA, 12 bp, Homo sapiens
ggtctgagttcc

SEQ ID NO: 659 - DNA, 12 bp, Homo sapiens
gggctccagaaa

SEQ ID NO: 660 - DNA, 12 bp, Homo sapiens
ttcaaaccctgg

SEQ ID NO: 661 - DNA, 12 bp, Homo sapiens
gagccccaagaa

SEQ ID NO: 662 - DNA, 12 bp, Homo sapiens
caagaacagctc

SEQ ID NO: 663 - DNA, 12 bp, Homo sapiens
hgtgtttcctgt

SEQ ID NO: 664 - DNA, 12 bp, Homo sapiens
agaagacgtgac

SEQ ID NO: 665 - DNA, 12 bp, Homo sapiens
ccagaagaaatc

SEQ ID NO: 666 - DNA, 12 bp, Homo sapiens
gggtcacggaag

SEQ ID NO: 667 - DNA, 12 bp, Homo sapiens
aacagagcccca

SEQ ID NO: 668 - DNA, 12 bp, Homo sapiens
caaagagctttc

SEQ ID NO: 669 - DNA, 12 bp, Homo sapiens
ggaaggtctgag

SEQ ID NO: 670 - DNA, 12 bp, Homo sapiens
ttccctgtgacc

SEQ ID NO: 671 - DNA, 12 bp, Homo sapiens
gatcttccctgt

SEQ ID NO: 672 - DNA, 12 bp, Homo sapiens
agcttcattcag

SEQ ID NO: 673 - DNA, 12 bp, Homo sapiens
  modified_base (1)..(1): a, c, t, g, unknown or other
nagagagctgth

SEQ ID NO: 674 - DNA, 12 bp, Homo sapiens
actgagactcct

SEQ ID NO: 675 - DNA, 12 bp, Homo sapiens
cgcctagaaaac

SEQ ID NO: 676 - DNA, 12 bp, Homo sapiens
ggtcaagtcggt

SEQ ID NO: 677 - DNA, 12 bp, Homo sapiens
gccccctagtgg

SEQ ID NO: 678 - DNA, 12 bp, Homo sapiens
ttgttatgcaaa

SEQ ID NO: 679 - DNA, 12 bp, Homo sapiens
caaattactgca

SEQ ID NO: 680 - DNA, 12 bp, Homo sapiens
ttaaagtgggct

SEQ ID NO: 681 - DNA, 12 bp, Homo sapiens
agggaggggatg

SEQ ID NO: 682 - DNA, 12 bp, Homo sapiens
gagcctaataaa

SEQ ID NO: 683 - DNA, 12 bp, Homo sapiens
aggttatctggt

SEQ ID NO: 684 - DNA, 12 bp, Homo sapiens
gttttctttgtg

SEQ ID NO: 685 - DNA, 12 bp, Homo sapiens
ccaagattaatt

SEQ ID NO: 686 - DNA, 12 bp, Homo sapiens
gaaaaaaccgtt

SEQ ID NO: 687 - DNA, 12 bp, Homo sapiens
ccacsactaagc

SEQ ID NO: 688 - DNA, 12 bp, Homo sapiens
wacyaaatgcgt

SEQ ID NO: 689 - DNA, 12 bp, Homo sapiens
aacatgtccctg

SEQ ID NO: 690 - DNA, 12 bp, Homo sapiens
aaattattttag

SEQ ID NO: 691 - DNA, 12 bp, Homo sapiens
bgcatctaagcc

SEQ ID NO: 692 - DNA, 12 bp, Homo sapiens
ctaatgcagaga

SEQ ID NO: 693 - DNA, 12 bp, Homo sapiens
ttgcctggaagg

SEQ ID NO: 694 - DNA, 12 bp, Homo sapiens
acccatccgccc

SEQ ID NO: 695 - DNA, 12 bp, Homo sapiens
agagtagacggt

SEQ ID NO: 696 - DNA, 12 bp, Homo sapiens
aagggtccagcc

SEQ ID NO: 697 - DNA, 12 bp, Homo sapiens
ccacttgvgatt

SEQ ID NO: 698 - DNA, 12 bp, Homo sapiens
cagcctgtgtaa

SEQ ID NO: 699 - DNA, 12 bp, Homo sapiens
ttctaattatcg

SEQ ID NO: 700 - DNA, 12 bp, Homo sapiens
accgacacgggg

SEQ ID NO: 701 - DNA, 12 bp, Homo sapiens
cggcgggartct

SEQ ID NO: 702 - DNA, 12 bp, Homo sapiens
attgcagagagg

SEQ ID NO: 703 - DNA, 12 bp, Homo sapiens
gcagagaggtgc

SEQ ID NO: 704 - DNA, 12 bp, Homo sapiens
ccctacactcac

SEQ ID NO: 705 - DNA, 12 bp, Homo sapiens
gagaatgagttg

SEQ ID NO: 706 - DNA, 12 bp, Homo sapiens
hggaaattgcag

SEQ ID NO: 707 - DNA, 12 bp, Homo sapiens
vacmctcacctg

SEQ ID NO: 708 - DNA, 12 bp, Homo sapiens
agaaatccctgt

SEQ ID NO: 709 - DNA, 12 bp, Homo sapiens
ggagtattcagg

SEQ ID NO: 710 - DNA, 12 bp, Homo sapiens
aaccacagggat

SEQ ID NO: 711 - DNA, 12 bp, Homo sapiens
ttggagaatgag

SEQ ID NO: 712 - DNA, 12 bp, Homo sapiens
cacatttcccca

SEQ ID NO: 713 - DNA, 12 bp, Homo sapiens
tacaccctacac

SEQ ID NO: 714 - DNA, 12 bp, Homo sapiens
gagatgagttgg

SEQ ID NO: 715 - DNA, 12 bp, Homo sapiens
tccctcactagg

SEQ ID NO: 716 - DNA, 12 bp, Homo sapiens
gaaaaacawaga

SEQ ID NO: 717 - DNA, 12 bp, Homo sapiens
cctgcactbwca

SEQ ID NO: 718 - DNA, 12 bp, Homo sapiens
tcrcysgggcac

SEQ ID NO: 719 - DNA, 12 bp, Homo sapiens
gccctcacgtgg

SEQ ID NO: 720 - DNA, 12 bp, Homo sapiens
acccctatgaaa

SEQ ID NO: 721 - DNA, 12 bp, Homo sapiens
acacccacacga

SEQ ID NO: 722 - DNA, 12 bp, Homo sapiens
taggagggtgag

SEQ ID NO: 723 - DNA, 12 bp, Homo sapiens
accctacctccg

SEQ ID NO: 724 - DNA, 12 bp, Homo sapiens
cctgacgtcctc

SEQ ID NO: 725 - DNA, 12 bp, Homo sapiens
cgtagtaggtga

SEQ ID NO: 726 - DNA, 12 bp, Homo sapiens
agactgtacatt
